United States Patent Application Publication US 2020/0085069 A1 - sequence listing, part 3

SEQ ID NO: 32 - DNA, 544810 bp, Bacillus amyloliquefaciens
aacaaacaattccatctatagattagatggaattgtttgttaaagtctggacagcagttttgaaaattattatttaaaaaaatcaataatggtatttagaataccggtgaatttcaacaaaagaaatattacacagataatagagaagcccaaactaattttctctaaagttgtctttttctcatttttacttgacataatattaatctcctttttttgatacatatgtttttttgctgttatacagcataataaatattattattaatagggttattaatataaaaatagaacggtttgataaatgattttgaagaagtgttaagttaataatttcatatatgagactaaatgaaattattaaaggaacattccatataagaaaatgagtgaaaataataaaagctaaagacccattatatctatatccatgagaattataattacttttttggaaaactcttctcagcattacttttgaattaatatatgtcagaatcatcaattccaacaagccgaaaagaaaatactcccatcttaaagattccgttaaaaatactataaccaaataaattcctgcgatgccagtcgatatcaagtataggtatcgacttcttattctgtacaacgactccaaatcaaaaggtattgtaaacaataaatctttatgattaagatcgtctgattgcacaagagataatgaaatagaggtaatgaccatagcaaaaacagtaataaaaataggtaacaaatgctccgaagatacgaatttatttctaatttcaattacactggtgaaaagtataggtgttatatatattgaaaacattttcggagatctaatgagataaagaatatcttttttcaaaaaatagttttgaatatacttattaataaataaagaaactttccttgcataaaatgatttttcaagctcccgggatgagattgataataatcctttacgataacaatgctttgtgagataaaaagcgattgctgttattactaaactgtagaaaattatcaacaggataaaaatcaatacatcggaggcatctgcatgatttaatattaaaaagtctgaatatttcacaactccgtaaagtatgtactttgtggtgctattttgtgctataaaataagatttatagttatttgaaaagattattaatccaattactgcgactgcaaaaatagtcattaaagtataggcaacagtttttagaccatgtcctttagagataagaaaggcaagggcaaagaaaatgtgagtaagagaactgcaaaagaaagatacagaaataatctgaatcattgtggctaatacaatattaaattctaaattcccggcgaagaaattcgcaataacaaatggagttaagaaacatccagttaaaatcattgtttctaaagttacaacaaaaaatcttgaaagtattatttgagatttttggattggagctataattaatatctcgcgttcaattgaaaggaagtactctttataatattgttttactgaagaagaaaaggatataagacaaaggaaagcataaagcccaagggtatacttattcatattaacttgtatattatgagggaacaattttataatgaaataaaggattaatgttaaaaaggaaattaaaataacaaaagcaattctttgggcgtataagtcaatcctagaattttttttggtattagcagtattgctgattttatatttaaactttaaataattataaaaattcatacttctcttccttctaccgcagaaactaaatattcttcaacgctgttaagcgtgttacgtatttcgcttactgagatattatctctaattatttttcctttatctataatatatacaacgtcagcaatttcttcaataatatctaatgaatgagaagataaaaaaacagttccaccattatcagtaaagtcgttcagcatttttttgaattgtttaatacttaggggatcaaggcctaatgtaggttcatcatacaataacagttttggttgatgtatgatagatgagataatacatactttttgcttattccctctcgataaagactgaataagggtatttctgtactcttccatttcatagtgctctaggtatttgtctattgcttcttttatttgaccttcatctttcattccataaagataggctataaaatttaaatgttcaaaaacagtcagcttctcaaaaacagcggggtaatccggacagtaaccaatatatctcttatagtcattttgattataattaatcttattatttaaaaagtagacttcaccttgatttggcaattcaatacccataacaatcttaatagtagttgacttcccagcaccatttcgtcctaaatacccacaaatcgttcccttttttatcttgagagattcaatagaaagaatgtttttctcgtcataggtttttttaacattttcaatacgaagaatttccaagtagataaatctccttttttattatatattatatggattattcttttaatatataataacatttaaagaactacacatcaagaatggggtataatccaacttgttgtgtagttcatttgtattacttagccaagaatcattttaataacgtcgtatacagaatatccttttaggaaccaatcaacgatttttcctgggtgtttttggatatacgcaaggattttctttccacttgtatatgaatatttagcggctgcagcagctaagttacctgcccattttaagaatgatgcgaccttaccccacggtactttagatacaagagcttttaatgcttttaaaattggtccgaacaatttgtttcctcctatttttcaagaaattatttacaaaggcctttgtcgctttttatattaactagaaaaataagcaaattcaatatattccagttttaatttcggttatccgaaatgttttatggatagaatgtttgaaatattgttctttagaacttgcgggagaaggattaatttagggataaggtatgggttaatttaattgatttttttagattcatctagaactttctttctagagatgattttgatcacacgttgtttcagacggtgcttcatcaggacataatacagcagcgacggaacggccaggccgatgacccaggcaatgtcgcctccgccgaatatttcagcgagcggcccgatgtaaaaggatgtattgatgaacgggatttctaatataatcgacaaaacgaaggcggccgctgtaatccaattgaccctgccatattgtccgttgacgtcaaacatcgatttgacgtggtattttccgcgtcggataaaatagtaatccacgaggttgatcgccgtccatggaattaagaaataactgatgaaaaagatgaaatttaaaaacagttccatgaaattgctttggcccaagagacttaatacagtacccgctgccgtcacacaaaggatcattaccactctcgttttcggcgtcaccttcagttttaaaaacggctccaaagtagtcgtcgttgacataaaggctccgtataaattaaagacgttgatcgccatttgtccgaacaggacaatgatcagcataataaaggaaaacggaccgaacaatcggacaatctcatttcccgcattagcggtaaattccgggagcgccgtcgtcaaaatggcgccgagaagcatcatccagatggaactgactgacgtacctgcgtagctgtaccaaaaggtatgcgatgccggtgttttgaccggcagataacgggaataatctgcgacatatggcgcatatgccagctgccatgtggccaccgcgctgaccgccactagaaaaacaggcagatctaatgagccgggcacccagcttcctgaaggaatcggcagttgaaaaataagaatcgttgcagcaaaaaaaacggcaaaggaggtccaagagaggattttctgcattttgtgaatcagatcatgaccgtagatcgtgagtaaaaaacagatggcgcttaagccgataatacaccatgaagccggaatcggtacaaagctgctcagtgtaccggctgcgagaatcgtactgctcgcaaagaagcccaggtagataaacatgaccaaaaagaggggcagaatcgctccgatcacgccgaattgcgcgcggctttgaatcatttgcggaattccgagctgaggtccttgtgcggaatgagacgccataaagattgcgccgataaaggtcccgataataatggcggcgatactccaaaagagatcgagtcccattgtaacgggcagtgtgcctgtgactaacgtcgtaatatgcatattagccccgaaccagacggggaataaatctttagcctttccgtgtctttcgtcatgcggaatatgttcaatcgttcgcctttctactttcaatagataatctcctccgtatgttcttctttaacataaagacatagcttaacagattgacctgccgtttacaaattccagcatgcaggaaaaacattgaaaagcctcgctgacagccgttcaaaagtttttttgaaaaacggaacaaacactgccgccaaaacgatttgccagggtttaaaaggcatggatatgcttacggactaatatgtattaaggagaaatgtgtcaatcttttgacgaatggagccattattcgttaagctgaaagaatagtttactttgtgtaaatttcataaatgaaaaggggattgatgatatgtgtacaagtcttacattgaaaacgacagacggtaatcacctattggcgcgaacgatggattttgcatttcagctcggtacggacgtcgtgctttaccctcgtcagtacagctggaaaagcgaagctgacggcaggatgcataagacgaaatacgcatttatcggcatggggagaaatctcggcaatgttctgtttgccgatggcgtaaatgaaaaagggctgtcgtgcgcgacgctgtattttccgggctttgcgggatacgagaaagcggaacgggagggcacctgtcacatcgctcctcatgagtttgtcacctgggccttatcaaactgtgaatctcttgaagacataaaggaaaagctctcaatgctgacgatcgtagagaagaagttaatgttattggatacggtgctgcctcttcattggattttatcagaccgcacgggcggctgcattgtcatcgagccgacaccggagggaatgaaagtatatgacaaccaacccggagtgatgaccaacagtccggaatttccttggcatgtgaccaatctgcgccattatatcggaatcaggccgcagcagtcagaaagcaaaacattgggcggaatgacattaaccgctttcggccaaggatctggaacaatcgggcttcccggtgattacacgccgccatcccgattcatcagagccgcttatctgaaagagcatttagagcctgccgcccatgaaacggatggcgttacggccgcttttcacgtgctgtccaatgtgaatattccaaaaggcgcggtgatcacggaggagaatgaaattgattatacgcagtatacgtcggttatgtgctgtgacaccgggaactactactttcatctgtacgacaaccggcagattcacaaagtaagtttattccatgaagatcttgaccgtccggagccgaaagtatttgcggccgcggcggagcagaatatacaggagctgaattagctcaaaaaaaaacaggacgcgattgtcctgtttttttatttaatacggatcagacggatggctttcctgttcagcctgttttgcggcttgtgccgtatcagtagtgccgatcggcccgccgctgttgctttcggaggcttttttcagcccttccgcaacacgttttccgtagtccggatctgcttttgtgaaattctcaatcatttgatcctgaatgtctttccggcaggaagaaagcgtattgaccaagtttgtgatcaattcgttccgttcaaattccgaaaatctgcggtatgtttctccggcctggccgaagttattcgaccggtcgatcgcttcccgcttcacatcgccttcgacatgaggtgtatggtctttcccatcctgctttgcttcgttgagtcctcccataatggacggctcatagttgacgtgcgggttttgtccttctgcccgatcgacccgatactgcatttgcccgccttcctggttggtggcgacatgctttttcggcgagttgatcggaagctgcaggtaatttgcgccgacccggtaccgctgggtatctgaataggcgaatgtccgcccctgaagtaatttgtcatctgaaaaatcaaggccgtccacaagcacgcccgttccgaatgaggcctgttccacctcggcatggtagttttccgggtttttgttcagaaccaatttaccgatcggcttccaagggaaatcgtctttataccacagcttggtcggatcaagcggatcaaaatccagctcggggtgttcgtcatcagtcatgatttgcgcatacacttcccattcagggtaatcgcctttttcaatcgcttcatacaaatcctgtgtcgcatggttaaagtttttcccctgaatctcttccgcttccttctgtgtcaggttgcggatgccctgtttcggttcaaagtgatatttgacgagcacggcttttccttcttcattgacccatttgtaggcatggacgcctgagccctgcatctgccggtagttggccgggatgccccacggcgaaaacaagaaagtgatcatatgagtcgcttccggtgattgggaaatgaagtcgaaaatacgctcgccgtcctgaatgttcgtaaccggatcaggctgaaatgcgtgcacaagatccggaaacttcagcggatcacggataaaaaagattttcaggttgttgccgaccagatcccagttgccgtcttcggtataaagcttaacggcaaaaccccggggatcacgcaatgtttcgggggaatgctttccgtggttgacggtagaaaaccgcacaaacgccggagttttcgttcctttcttttgaaacactttcgctcttgtgtatgtagaaatcgcctcgtctccaaaacttccgtacgcctcaaagtatccgtgtgccccggcgccgcgcgcgtgaacgacgcgctcgggaatccgttcgcggtcaaagtggctgattttctccaaaaaatcataattctccaatgtcgtcggtcctctattgccgactgtcctgacattctggttgtcagtgaccggatggccctgccggtttgtcagcgtgtcttctgactcgcctttaccggtcgtcttactggaaagcgtttcttcgctgtttttgttattttccattgttgaaccctcctttttgaacggtaacaatatgcccagcagagccgtttcttaaaaccgattttcaaaagaaacagttattccgcgatcggcgtcaaggacccgccgttccatatttcgcccttgttcagcgtccagctgttttgataaaggctttgcgcgccttgattggccgccggacttaattgttcatcccatgtcaaaaagtacgttgtctcgggatacttttgcctgatcgcattgataaaagcatcataatcaaagcttccgatattgccggacggaccggtttcggcaaaggcaaacggttttttcagagacagcatttcatcatagcctgctatcgcatacggatcagtgaagtaagcgtccagaccggtaatatccacataagatgagcctgggtagaagtctgttttaaagtctctgttggcatccggcgaatacacccacaaaaggttatccaatcctcttgtctctgtcatatagcggtatatcttcttgtaaagctctttgtacagcgagattctttcattgtctttttggttgtagcctgtcagcccccaccagaaccactcgccgttcatttcatgcagcggtctgaacagaacggtgacgccttgatttttcagctgagtaaggccgtcggcgattttgctgagcagcgcctcaaggcgttttccttcaacagttgaagggtccaggatgtttttgtactggctgtttgagatggccgttttatagtttccggatggaaaagccggatttgcgagatgcaggctgacctgagggaggccgccgcttttccagtatgagattaagctgctgttgcagctgtaatcgatagtatcggtgatatccgctgtttcaagccatcctctcccatagtcacagccgtagatggcgggagactgtcccgtcgcgtttttcaaacggttttcctctgtcattgaaaaagtgacatcgctgtacccgccgaacgccccggacatgaccctgttttctgaacggttgggcaggtgcgccagccagttcatgatatctgttgtcgtctgctgggcatttggattgacgggataaacggtgtgagccgatatcggactggcggctcctaagagtaataaaacgatagacaggcagactgctaactttttgagcataaaaaagacctcctgatttttagggtgatgaaggatgtgaaacgataacctcacaatctccttctataacaaaatctccggaatccgccggcacgataaagtgatcgcctttgtgaacggggcatccatccagttctccgtgtcctttaatgacgcttgcgagtaaataccggccgggtgcggggaatgatgctttcccgctcacattccattgataaactgaaaagaacggtgtttcggcgagtgttgtaataagagcatctccgatccgatgctttgtgctttttactttttcatcggtatgaggaatctctgttacgtcaattgctttctgaagatgaagctcgcgtttattcccgttcccatccgtccggtcatagtcgtaaagccggtaggtggcatcagagctttgctggatttcaagaacgagcgtaccttcacataaagcgtgcagtgtgccgctcgggacatagaaaaagtcgccgggtttaatagggatgcggcggagcaggtgatcccactcgtttcgttcaatgagccgaacgaagtcttctctcgtttgggcgcgatgccctaaaatgagctccgcgtcttttttgcagtccaatatgtaccagcattccgtttttccgagttctccgttttcatgccgatgtgcatatgcgtcgtccgggtgaacctgtacggataagtccatatttgcgtcaagaatttttgtgagcaggggaaaagcgtcttctttcggatgtccgaacaggtcagggtgttcattccagagacggtgtaatgatgttccgaaaaaaggcccgttccgcacgatggatgtgccgtgcggatgagctgaaatcgcccagcactctcccgtccgctcagaaggaatctcatacccgaatgtatcgcgcagcttcgtcccgccccataatctttctttaaaaaccggttccaaaaataagagcttcgtcattttcccgcctcccggtttgccgcttctaaggcctgctccgccaatacgagcgaaccggccgcaccggagtgaatccctaattgagggggaacgatgtatttttcaatatcgggcagatcaatatattgattcagccgctttttcacgtgctgacggatagaagagaacagctgatgctgtttcataacacccccgccgaggatgattttttccggcgaaagtatgagaatatactgcacaagcgcttcggcaatataataggcctcaagctcccacacttcctgctgatccgtgagcagaaatgctttttcccccagcgtttctctatggcggggcctgccgcgaggccttccagacaatctgtatggtaagggcaattgcctttgtagccgtcgtccggatgtcttctgacataaatgtggcccatttcagggtgagacagcccttgaacaaatctgccgttcatgatggcgcccgcgccgatgcctgtgccgaccgtcaaatagaggcagctgtccgcgtttttggccgcgccgaaagaagcttctccaagcgccgccgcattaacgtcggtggtgaagcctgcgggaatatccagagcgcttttgatcgtttgaagaatagggcagttccgccaggctgtcttcggcgtcgcggtgatgcacccgtatgtttgactgtcgggacggatatcaatcggcccgaacgacccgatgccgatggcgtctatcgggaattcttcaaagtaacggatcacctgtctgagtgtgtcatccggttctcccgtcggaaactctgctctgtccagaatggtgccgtctctttgtccggcggcacagacaaatttcgtgccgccggcttcaatacctccaagcatggccgtccctcctcatctgttaaaatccgttttgatcggaaacggatttgaaccagcggccgctttttttgacggtccgttcgcccccgttttccagattgacagatacaaagccgtagcggtttttataagcgtttgtccaagaccagttgtccatgaaagtccacaggtgatagccttttacatttgaaccttctccgatggcccgatgcacccatttcagatgttcctggataaattcaatcctgtaatcatcctgaatgatgccgttttcatcgcggaagcgttcttcgccttctactcccatgccgttctcagaaataaaacactcgatatttccgtaatgttctctgagattggtgagaatgtcatagattcctttttcgtaaatttcccaaccgcgatgagggttcattttccggccgggcatgacatacggatcgaagaaacgctcaggcaggaaaggggcatgcggattcggaacatgttcttttgccttgacgcgcctcggctggtagtagttcacgcctaacaggtcaaccgtatgctcctgaatgaggcggagatcttctttctcataatgcggcagaaagccttccgccttgagaatctcgacaagctcctcaggaaattcgccctttacggcgggatctagaaatgaacggttgaaaaaggcgtcggcaatccgggacgctttgacatcttcaggatgtgagcttctcggataagaaggcgtcagattcagaatgattccgatttgtccatcctgtttcaattctctgtaggctttgacagcccttgcattcgacagcagggtatggaagccggcctgcaccgcttcttgaaaattaacgtgattcgggtagtgaaagtcgtataagtagccgccttcaatcggcacaatcggctcgttgtgagtgaaccattttttcaccttgtcaccgaatagcgaaaagcatgttttggcgtaatgttcaaacgcgtcaacggtgttccggctgacccagccccccttacgctgaagggcgagcggcatgtcaaagtgaaacaaattgacaaacggctcaatgtgatgggcaagcatttcatcgatgacgtcctgataaaacgcgaccgctttctgattgacctcgccagttccgtccggaatcaatcttgaccaggaaatagacagccggaaggagttgtggccgatttctttcatcagccggatatcctccttgtattgatcgtaaaaacgtgacgtgtcgccgggaccgacgccgttaaaaaaacggctcggctctttttcataccagtaatcccatatgttttggctttttccgtctctgtcggcggcgccttctgtttgggtggcggaggcggaagacccccaccagaatccttccggaaaacgatattgaatatttgattcagtcaattgatttctctcccttactgcgattttgattacatactcatgctgtcatcccgggcatgctgctcggtctcagcttctttttcctttgccatgtttaatttgtccagcgctttaagaaacgggagccagatgacaaacacaatacagaggttgaccagctgcataatgccgcccatgacggaattggtcgccataatcccgttaatgaatagggggacggtccaaggcacggtcacgccggtaggagggggcacgatccccgccgacatggccaggtaggtgacaagggtgacaaccatcggcgcgatcacccacggaatgataatgatcgggttcatcacgatcggcaaaccgaaaataaccggctcattgacattgaaaatgcctggcgcgagaccgagtttggatatctgtttcatctgtttgcttttcataaaaagcaagatggcgatcactatggccaatgtcattccggttccgcccattccgacggtgtaaatctccataaacggcttagaaataatatggggaatctcttttcccgctgtatacgcagccaaattttcgacctgtaatgtattccaaatcgggtccatcacggaattgataatgatttgtccgtgaagtccgaaaaaccataaaatctgaataaagaaaacagcgattaatgtagggatgatgccgcttccaagtccgacaagcggggcttgaaccgtatgataaatgacatcatgcagattggtgtgaaagatttgggtgacagccgcattgatcaagaggaagacggtaagcgtgataaaagccggaatcaatgcggcgaacgatttagcaacagccggaggaacaccggcaggcatcttaatcgttaagtttctctggacgattcttctgtagatttcacctgacaaaaacgcggtaatcatgccgagaaacatcccttttgctccaagccggtcaaccggaatgacgcctgcgaccgctttgcccgtttccggctctaagacgaacggggtgagcagcagaaaagaaaccaatgcgatcgctccgccgaatacggcctccacttcgtagcttttggaaaggtaatagccgatcccgaagacgacaaaaatggacataatccccatcgtcgccgtcgaagcgccgccaaatccggattgaaagacagacagtgcggagctgctcatgattttgtttaaaaatggcaggttcgtcagcacgacgaacaccgaaccgaaaatggtcagcggaaacgccagcataaaagcatcccgtaagacttgcaagtagcggttattgtttaatttgccagcgatcggaataaggaattggctgattttctcaaacacgtcttcacccccggctttctataaattttttgattgaaataagtcgagcatttctttaacgagctctttcattgaaagcgctgacattaagtggtcttcagcatgcataaaaagcagagagacatccgtcttggcgccgccggcttctttttgaatcatctgaaaatggatgtcgtgcgctttccccagttcttcttcagcctttgtcagaaaggtgcctgactcatctgtccggccgtctttatatgcgcgtatcgattgaataatattgctgcgggcattgccgctgtgaagaatcagctgaaaactgatctgttcatccgtgtacgtttccatgcttatcgcctcctttatttgttctctatcaaggcaacggcctgttcgtatgcttttttgccgtcccccatgccgtatgccatcatatcaatcacatcaacggtgatgtgaagcgggtccgcctctttctgaagctcaccttttaaaaaactcatctgcgggccgataagtacgacgtctgcatctttcatcgcttcttttgctttatcctgtccgactgcccaaatctcggcttcctcaccgatggagcgggcgtaattctgcattttcgtgacaagaaggctggtggacatgcctgagctgcaggctaataaaattcttttcatgaggaatcccttctttcgtaaagttaaaacgttttcatgaatattataatcttttcaaattaaatgtctatacttttaaaatataaaagttttacttttcggatttttgacacaaaaaaaccttttaagattcaacttaaaaggtttttcatctcaagcgagccataacagccataaatagagtccgatcagggtgataaataacgtcggaatggttaatatcagacctgtcttgaaatacattccccaggaaattttcacgtttttccggctcagcacgtggagccataacaatgtcgccagcgatccgatcggcgtgattttcggcccgaggtccgaaccgataacattcgcgtaaatcaatgcttctctcatcagcccgtgagtgcccgttccgctgatggctatggcgtcaatcatcaccgtcggcaggttattcataacggaggagagaatcgcagcgataaaccccattccgagtgtgcccgcaaacaaaccgtgatccgccgctttctgaataagctgagaaagaagatccgtcagtccggcattccgcaagctgtacacgacaacatacatgccgacagaaaaaaacacgatggcccacggggcgtccttgatgacttgtttcgcagggacggcggggcttcgctgcgccagaatgagaaaaatgaccgcgatggagccggcaacgaaggaaacgggtatcgacagcagttcgctgacgaaatatccgatcaataaaacggccagcacagcccacgataaccggaaaaggcgttcatccttaatcgcggatgccggatgtttcacaagaccggtgtcataccgtttcggaatgttttttctgaaatagagatacagcaccaaaatgcttgccgccagagaaaaaaggttgggcaccagcatgcgtgatgcatattcaatgtacccgatatgaaagtaatcggcggatacaatattgaccaaattgcttacaacgagcggaagcgaggtggtgtcggcgatgaatcctccggcgataataaacggaaaaaccagcttttcaggtaaattcaaagcccgcaccatcgccagtacgatcggcgtcaaaatgagcgccgctccgtcattggcaaacagggcggagacaacagcccctaagaccgacacatagagaaacatccgcagcccgctgcctttggccgccatggccatatgcagcgcggcccactcaaaaaaaccgatactgtcaagaatcaatgaaatgataataatggcgataaaggcaagtgtcgcattccagacgattcccgtcacttccgcgatatcgtgcaggctgactgctccggcgatcaaagcgaggaccgctccgccgcaggcagaccagccgattgatacatgtttcggctgccatatgacaaacacaagtgtcagcacaaaaatcagcgctgataaaaccgcaactcccaagaatatatcccccttaccggcatgtaacagtgacttctttttgccgcaatgtctgtaaaacttcgtccttttcatctatctgctgcagaatcgagcaaaccagcgcgtatttcggaccggacggatgaatggcatagtaccgccactggccctcgcgtctttcccgcacaaggccggcgttctttaatttccgtaagtgctggctgatgccgggctgacttatatcaaaaatagctgtcagctcgcagacacaatattccttatcctccagaagcttcagcatcaaaagcctcgtccggtcgcttagaagcttgaggcactggctgatcccttcggaacttaaaacatgatgccgccgttccatgcgctcactcctttttcacactattatataagcagatgtttatataagtaaacgacaatataaaaaagccggtcttgctctttttgcaaaaccggctcatgtttatttttggaacagttttttcgcttcatccattgctaatttatttcccagtgctgaataatcaagccaaggctgatcggcaattttatagacgtggtttgatttcacggccttcagccctttccatacagcgcttttttgcaattctttataggcttgctgtgacttgtcgtctctgttaacgacgacgaaaatcgcatccgcgttgtaatcaggcagcacttcttgagaaatgacttcataagggcgggaggtgttcatttctttaatgccgtcagccggtttcagcttcagatcgtcaaacagaatcggtcccatcggacggcgtgtgctgaagacgcgaagctcttttgcgttcacgcggatcgccatgactttggcgtttttccctaattccttattcatcatggatctgacttgttttgtttcatcttcgtaatcttgaataaatgttttcgcttctttttcacggttgacgatttttccgatgtcttttaaatgatcgcgccatgtgcctttatcaaggtcgaaaacgtgtgtgtttccgattttcttgtattttgacaaatcttttcccgcaaattctttatcaagataaatgttgtctggattcagctcaagtaaagcttccatatccgggtctgaggcaggtccgagttttttcgtgtctttcagctgatttttcacatgagggagaaaatcttttaattctccgcccacgacggaaccggccggtgtaacgccgagagccagcagatcatttgtcaggtgaatggacatcgaagcgattttatgatcgccggatttcttttttgactccggctgtgttgaatcggattggcaggcagccaataagaaaatacacatgaaactgatgagcgcaattatttttttcatgggaatactccttgttttatgatttgattttcatgacgagatagagaaaatacggcgcgccgatggctgcagcaaccacgccggccggaatggcgttcggctgaaacaaagaccggccgatggtgtctgccgcgacaagaatgacaagtccgattaatcctgcaatcggaataatatgctgatgcatggtgccgacgagccgtcttgccaagtgaggggcggcaaagccgataaagccgattcccccggccatcgcaacgctcgcgcaggacaagccgaccgctatggcgatcagcatgatcctttttctctgcacgtgtgcgccgagccccgcggctgcctggtcaccgagcattaaaatattcaaagaccgggcgttcagccatgcaagcggtgcgagaatgccgatccagggcaatagcgaccacacgtgaatccaatccctgccccagacgtttcccaccagccagcgggaagcgaatgtataagtttcttcattcaggcgcagcgacataaacaatgtaacggcgctgaagcctgcggaaacggcgatcccgactaacagcatgcggatcgttaaaaaaccgttcagcctgtcgtacgtaagcactacgatcagcagggcggcgagtgttccgcccgcaaacgtaaacagcgggatgaacatcgacgcctgcgcctccaaggaatgaaagaatgtgatatacatcatcaaaccgaaggaagcgccggcatgcagtccgagaatgcccggatcggcaagcggatttcgggatacaccctgcaaaatagcgcccgacactcctaaaccgatgccggccagcatcgtcaccagaatccggggaagccggtaatcgaataaaacggttgtgctctgaaacgtgccgtatccgaacagcgtttttcccacggtgagaggagaaagccggaatgagcccgtatgcagcccgatcagaatcatgcaaacggcgatgaccagcagaatgagtcctgccgccgccgctttttttgtttctttctgcactttcatttataagtctctcccttccttgcgggcaatataaagaaagaaagggacaccgacaagtgcgaccataatgcctatcgccaattccctcgggggactgaccgtgcgcgaggccaggtcagccaaaatcaatagaatcgcgccgagtaacgcggacatcggaataatcagcctgtacgtaacgccgacgatctttcgcgcgatatggggaataaccagcccgacaaagccgatcgcgccggcagcggaaacagacacaccggcaagaacgacggcgatcattaatccggcggcacgcgtcagcaccgtgttcacccctaaattcgccgccacgtcatttcccattgagagaagggtgacggaccggcccatgaatgtcgcgagaatgatgaagactgcaatcacgggaacaaggacttgtaaatgagcccacttgatccctgacaccccgccggcgtaccagaaggccaaatcctggcttaaatcgtaataaatcgccacaccggtactgagtgaatgtaaaagagcggccacgaccgccccggcaagcgtcacctttaaaggtgtcatgctgccttttcccgccgcactgataaagaaaatcaagccggtgcttgccagtgctcccaaaaatgacatcaccatcagcagggcgtatgacaaatgagggaaaaaagcaaaactgagcgcaacaacaaacatggcgcccgcgtttacgcctaagacacccgaatcggcaagcggatttctcgtgacaccctgcatgagggcgccggctgcggcaaaagcggctcctgtaacggccgcccctagcaccctcggaagacgcaattcatgaatgatctgctggcccgttatgttcggattgtaatcagcagcagccgaccaaaccgtatgtaaagtaatgtctttcgcgccgaatgagacggcgaaaaaaatagatacaagcagcccgatcaccgcgatcaggaagaaaaccccgttttttaagatgctgatcagacggtttgcggacgtgacagaatcgctcaaaaatcaattcacctacttttatgatcattgtccggtatttattgaatatgagaatcattttcatttgaaccatcatattataccgagccgattttcaaaacgcaatagagcgttcaacaatgatgtccttttttttcatgtttatattgtaaaaaagaagtgaaaaacgtgaaagaggaaatagctatattcagaaaggagggaggcaaatggcgggagaacgaaagcctttgccgattgaattttaccagaggccgtcagtggagcttgcccctttattgctcggctgtcttttggtgaaggagacggacgagggaacggcttcaggttttatcgtggaaacggaagcttatatgggagcggatgaccgggcggcgcacagcttcggcaaccggcgtacgaaacggacggaaattatgttccatgaggcgggccgcatttatacatatgtcatgcacactcatacattaatgaacgtcgtcgccgcggacatcggcattccgcaggccgtgttaatcagggcggcggagcctcatgaaggacagttcctgatggagagcaggagaccgggcagacccccgagagagtggacaaacggcccgggaaaactgacgaaagcgatgggcatttcaatgaacgactacggcggcatgatcacggaaccgccgctgtatattaccgagggctttacgcctgaacatatatcaacaggcccgagaatcgggattgacaacagcggagaagcccgggattatccgtggcgctattgggtgacggggaaccggtatgtctcacgctgaccatgtttataaccgctgataacaggggaaagacaaggtaaaagaaaggggattcagacattgaaaaaatttttcaaaacgattatcaaatgggcgcccgtcatctatccgatcatcagaaaaatcataaaagaacggaaggcatctaagcggaaccgcatgtccgcatcccgaacagccggctgatccggctgtttttttacgggcttggcatcggattgccgcattgacttgaaatccttcccattatagaatttacatacatttaccccttcctcattctttttgcccatttttcacgtctgcatctgatctgataggaggtttttctcatgcttcatgggcggcttcgtgaacttctgcgcttgcttttagctgctgaaacaccggttacaagctcagtcatcgctgcaaatgtaaaggtaacgacacggacggtccgcaatgacataaaggaactgcaaaccattgtagaaaaacacggcgcatccattcaatctgtcagagggagcggctataagctgctgatccggaatgaacagccgtttaaaaactggcttcaggacaatttccagcaaaacagcaccgtgccgatttttcccgatgaacggatagattaccttatgaaaagaatgcttctgaccgacggctacctcaagctggatgacttggcggaagaactgttcatcagtaaatccacacttcaatctgatttaaaagaagtcaaaaaacggctccgcccctatgacatcattttggaaacaaggccgaactacggctttaagctgcgcggcgaagagctccgcctccgttattgtatggcggaatacttagtggacgaccgcgagcctgagcctgatctcctgagtgaaaaggccggtattctgccgaaagacgacattcatgtgatccgcacagccattatgaagcaggttcgaaaccataagatcccgctttctttcttcggcctgaacaatctcatcatccatatcgccattgcctgcaaacgaatccggacagaaaactatgtatctctcattccggaagatcttcatgatattaagcttgaaacagaatatcagtcagcggaagccatcgtaaaagagcttgaatctgcgctttcggtcacctttcccgaacaggaaaccgcctatatcgccattcacctgctcgggacaaagcgcatgacccagtcacaactggaaggaaaagagcttacaaggctgatagacggagaaaccagccatttgacggaggccatgatcgaagccattgagcgggagctgaagctcggaatcacggatgacaatgagctgaaagcgggtcttgcgctccatatcaagccggcgattaaccgaaaccggtacggaatgaacctgagaaatcccatgctcgccgccataaaggaaaattatccgctcgcatttgaagcgggagtgattgcgggaatcgtgatcaaggagcaaaccggcattgatattcatgaaaatgagatcggatatttggcgcttcatttcggagccgccatcgaaaggagaaagacggaacggccgcctaagcgctgtctgattgtctgtgcgtccggcgccggcagcgcgcagcttttaagagaaaagctccgttcccggttcgcaaagcgtcttgaaatcgtcggaacggctgattactgcagccttgaccagctttcctttgagtcgattgattttgtggtcagcacagtgccgatcaaaaaagacctgccagttcccgtattaaaggttcagacgctgttgggcggcggggattttacaaaaatcgacgccatgctggaagaaaagcgggaacaattgaactttctgaaaccggagctggtatttttgcagcaggatctggagacgaaggaggacgttatccgttttctcggacagcaggttgcagaagccggcctcgcttctgattctctgaccgattctatttttgaaagggaagcgatttctcctacgagtttcggcaatcttacggcgattccgcacccgctcgttccgcagacagacacgacgttttgggcggtatgcacgctgaagaaaccgattgactgggcggataagcgtgtccaatttgtctgcctgctctgcgtcgagaaagaaagcaaggccgacctccagcatatgtacaaatggctcggcgggatgttagatgatccggccgcggtaagccgtctcttaaaatgcacaacctatcaggaggttttacgagtattcagagacaaacgatcagagaaagaccgggatacaccttttttccgttagcagcggaaaaagcctgagtagttatgaaagcgatttcataatatgatggtactaacatcgagacatacaaaatatcaaactttcaggaggtcttttacatgaatatattactcgtttgtgcagcagggatgtcaacaagcttactcgtcaccaagatggaaaaaagcgcgcaggaacaaggaaaagaatataaaatctgggcggtgtcaggcgattcagtcaaccagcatattgataaagcggacgtattgctgcttgggcctcaagtccgttatttgcttccgcagctgaaaaaattgggtgaatcaaaaggagtgccggttgaagtcatcaataccgtccattacggcacgtgcaacggagcggaggttctgaaatcagcggaacagctcggaaacgcatcgtagaaaggggcgggccgtgtgaataaggtgaaccagtttttagaagagaaagtcatgcccattgccggaaaaattgcctcccagcggcatctgcaagcattgcgtgacgggatcatcctcaccatgccgcttatcatcatcggttcgttttttctgatcatcggcaacctgccgattccgggatatgcggatttcatggcaaagacgttcggaagcgcctggtctcaaaaactgcaatatccggttgatgcgacctttgaaatcatgggtcttgtcgccgctttcggaatcgcctaccgcctggccgaaaaatacggggtggacgctttatcggccggtgcgatatctttggcggcgtttctcttggcaacgccgtacaaagttccgtttctgccttccggcgccaaagaggaaatcatggtgggcggcggcatcccgctgtctctcatgggaagcaaagggctgtttgtcgcgatgatcatcgccatgctgtcgacggaaatttaccgcctgatcatccagcggaatttcgtcttcaaaatgccggacggcgtgcctccggcggtcagcaaatcatttgtcgctttaattcccggctttgccgtcatctttctgatctggggcgcgcgtttaattgtcgaagcgacgccgtttgaaagccttcataacattgtaagcgttgtactggggacgccgctctcgattcttgggggaagtctcggcggaagcctgatagccgaagcggttcaaatgctcttgtgggcgtgcggattacacggggcaaacatagtcggcggcgtcatggcgccgatctggttcggagcgatggatgccaaccggattgcgtttcaggcgggcgatgcgcttccgaatattttcacccagcagttttttgaaatctggatcaacatcggcggaagcggcgcgacactggcgctcgtggtcaccatgtttctccgttcgcgaagcaagcagatgaagcagcttgggaaactcgccatcgggccggccgtctttaatattaatgagccgattattttcggaatgccgatcgtcatgaacccgatgcttctcattccgttcattatcacaccgcttgtcacactggtctttacctatatcggcatgagcactggcctcgtcgctaaacctgccggcattgccgtcccatggacgatgccgccgattttctccggctatcttgccacgggcggaaaaatatcaggggctgtcatgcaggcgattaatatcatcacagcctttatcgtgtactatccgttcttcagaatgtgggattcgcaaaagctgaaagaagaaaacgaacttgaacaatcgcaggcgccagccgtacagggagacgaaaaagccgtgctgtagagaaagggagtgaaacacatgaatgaaaaaatggaacagaccatttttcagatcatcctgcatggcggcaacggcagaagcgcatcaatggaagccattgccgccgcaaagcggggggacagagccatggccgaggaaaagcttcaggaagccgcaagggaactgaccgaagcccatcattatcagacagaactgatccaaaatgaagccggcggagaaaaaacagacatgacgcttttgatggtgcatgcgcaagatcatttaatgaatgccatgaccgtgaaagacttggccgctgagttagtcgagatttacgaaaaagtgagtctgcaagggggagcaaaaatatgacaaaaggaattaaaattgtaacgatcggcggaggttcaagctatacaccggagcttgtggaaggcatcattaagcgctatgaggaactgcctgtcagagaattatggctcgtcgacattcctgaaggcgagaaaaaactcaatatcgtcggcacgcttgcaaaacgcatggtcgaaaaagcgggtgttccgatagagattcacctgacgcttgaccggagagaagctttgaaggatgcggatttcgtaacgactcaattccgcgtcggccttcttgaggcccgcgccaaagatgaacggattccgttaaaatacggcgtaatcggccaggagacaaacggtccgggcggtttattcaaagggctgcgcaccatcccggttattctggaaatcgcgaaagacatcgaagagctttgtccgaatgcatggctcgtgaatttcacaaaccctgccggcatggttaccgaggccttgctccgctactcgaatctcacaaaagtcgtcggtctctgcaatgtgccgatcggcattaaaatgggcgtcgcaaaagcattggatgtggatgtcagccggatcgaagtgcaatttgccgggctgaatcacatggtcttcggattagatgttttcttagacggcgtcagcgtgaaagatcaagtcattgaagccatgggagacccggaaaacgccatgacgatgaaaaatatttcaggcgcggaatgggagcctgaattcttgaaggcgcttgatttgattccttgcggctaccaccgctattatttcaaaacgaaagaaatgctcgagcatgaaatagaagcgtcacagacggagggcacacgcgccgaggtcgtgcagaaggttgagaaagaactgttcgaactgtacaaagatccgaatctcgctatcaaaccgccgcagcttgaaaaacggggcggagcgtactacagtgacgcggcctgcaacctgatcagctccatctataacgacaaacatgatatccagcccgtcaatacaataaacaacggcgcgatcgccagcattccgaatgactcagcggtcgaagtgaactgtgtcatgacgaaagacggtccgaaaccgatcgccgtcggtgatctgccggtgtctgtccgcggactcgtccagcaaatcaaatcatttgagcgcgtcgccgctgaagcagccgtcacgggagattatcaaacggcgctacttgcgatgacgatcaaccctctcgtcccgtcagactccgtggcaaaggccattctggatgaaatgcttgaggcccacaaagaacatctgcctcatttctttaagtcgattgaagcataagagcagtaaaaaaaacccggattcgcttccgggttttttgcttattttgattcgcttagtgaggcgacttctgtcgtccagccgaacacgtcggcttccgcgcctttttgaatgcctgtaatggtatcgtacaatttcttcgagatctctccggtttcaccgctgccgatgacaagactttcatcattccagatcagttcgccgaccggagaaatgaccgccgccgtaccggttccgaatgtttcttccaatcggccgtcacgatgcgcctgaatgatttcatcgatcgaaatctttcgctcagacacagtcagtccccaatgtttgagaagggtgatgacggaatttctcgtaattccttcaagaatgcttccgttcagctccggcgtcacgatctcgccgctgattttgaagaagatgttcatgctgccgacttcttcgatgtattttttctcaatgccgtcaagccataaaacctgggaaaatcccttctcttccgcaacctgctgcgctttcaggcttgatgcgtagttgccggcggttttcgcgtttccggtgccgcctttgacggcgcgcacgaattcgttttccacggcgatttttaccggtttaatgccttctttgtaataagagccgaccggggaaagaatgataaacagcttgtacgtatgggatgccgctacaccgaggaaaggctcagtcgcaatgataaacggacggatataaagggaagtgccttccgctttcggaatccagtctttgtcgatggctacgagctgtttcaggccttcaagaacaagctcttcatcaatgagcgggatgcaaaggcggtcatttgactggttcaggcgctccatatttttctccggtctgaacagaagcacttcctgatccttcgttacatacgctttaagcccttcaaaaacggtttggccgtaatgataaaccatggccgcaggatccattgagatggactgataagggataattctcggatcgtaccagccttgatcagcatcgtaatccataacaaacatatggtcggtgaaaattctgccgaacgcaaggtcatgggggtccggtttcggttttttggctgaagtcaattcaacacgaatatcttgtttcataatgttctgtctccctattggtgttattgtcaaacttatttgaaaataatttatattctattgtataccttcaacaaatattcgcaatagttttcctcaaatttgtgaaaaaatcaaatcacataaaaagcaggggagagaatgccccctgcttgttcgtttttacgtattctgtcatcaccgtgctcagtgaaccgtcaccttgccggttttgtaaaactgctccattgctttatcgacgtacacccagcccttccaggcgatatggatggtgtctttcataaagtacggatcatattcgtgcccggataagtcggcaacctgaaagcccttcgctttaatttgcttagtgacttttttgtagtaatcagtccggccttttttcgggaagccggtgtagtcataccattttccgttgacaggaataaccacgaacatcggctcagcgccggcatctttcagaatgtccagcatatccgcaaagtcgtgatattcgactgatttggcgtatgttctttttttgttgattcctttcactctctttactttcttcttaatctttttataagaagcgtcatcgatatagaaaggattggacttggagctccgttctcctaattgagcggcagctgtttttaactctgaccacgatttccctttcaggttttcagagatcgtccgttcagggcccttggtttctcccattgaataataaagatcttttttctcaagcagagaataataagctttggcagccggcatgaccgctttcactttccatgattgtccgttgaccattcccttgtataattcagaaaggacggcatcatgctgaacgactttaaaacggagcatgcgcttcatcatgttctttttgaccgcgggatcaatctggttattaaatgctaaatccaatgcctgaagtgatgaaaaattcggcgcaaagtgctgttcatcagaaccttttttgataaaccattgcggagaaacaatgaataccagttttttgcccttcagctgctgataatgcgccgcaaagttcacggcgtgtatcaaggattggtccccgccttttccgacaagataaggagtaaagccttggttgttcacttggaaatagttggacgggtgaaactcatccagtcttgaaagctcggaagaaccgaaaatcggcatatacttcgagtcttcgaacattttgttttgcagatagagcccctggaacatattcggatttaaggctgccgccgactcttcgacacgtttttcaggaatgaagcgcgtaagccatgaagccggaactgcgatagctccgacaaacaggacgaacgctaaaataattggtccaaagaaacgctttttcatttacttcaactcagtcagtttgtttacaatgttgtttggcgtattccactcgtcacggtcaaattcagtgatcggcactgtaatgccgaagcggttttcgatggcgaccagcagttctacagttccgaaagaatcaagcagtccttcttcaaagatttcaatatcaggattttctttcacagcgtcctcctgacaaacttcagctaatacgtctaatacttcctgtttaaattccatgtgttttcaatctcctttagtgatgaaatggttttcctgagaaaatataaaatccgaaacatacgaaatggaatgtgatgacgatggctaaaaaggccgtaaaacgattggcgggcagccatttgtatttcttattccatttctcaaaaaagttatacccggtcattaatacggcgtggtacaggccgtatacaatatattgcagggcgagtccgtgccagacgcccatcagcatgaacagcaggaaatacccgatgttcgagacggccatccggttctttatccattttttctttgtcatccagaaaacaaagcgcataaatacgtagtctctgaaccagaaggataaggacatgtgccagcggttccagaagtctttaatgtttttgctgataaacggcttattaaagttttccggagatttgatacccatgatatagcttacaccgacggcaaacatcgtgtaacccgcaaaatcaaaaaacaggtacaagctgtatccgtacatgtacagcacattaccccacagtttgctgtgggtgatatgagacagattcataatgaaatacgtgttaatcgcatatccgataatgaatttgtataagaaaccgataaaaattttatgaatgccggtatacagtaaatcagcgtattctccctttgtccatactttctgttcgtccttggcaaatctgcggtatctgtcgatcggaccggaagaaatggtcgggaaaaacataataaagtacaaaaggcggtgaagcggcattttttctttaatcagcccgtctctcgtttccatgatcagctggacgcctttaaatgtcaaataagaaattcctaagaaactgatcaggttatgaaccgggtgatgaggcgccggcggaaagaaaaacggccataatttagataaaaacaggggtaaaatggacgcgatcacggccatactgaagacaaagccgctgttggctttcagtctgtaagcgagataacccctgattaaaagcacctgccacagcgtaaagatacatagtgcgatcacgccgtgcagatcatgcgcgaaaatcaaagccaatacgatgatggatataaacatgttgtatccttggaatctcttgccgttcagccctaaaataatcgtcggcaaaagaaggattccaagtaagataaagaagaaaaacgagctgtaaggcgtcatacaagaacctcttcgccaatgcgtttacggtcgatttttccgttcgcagtcatttgaatgtgatcctgataaatgaattttctcggaatcatgtaggccggaagcgaagtagccagttctttcttaatggcgcttgtcagctggaattctttttcaaaatcatgtttctcaggcacgatggcggcaattaaatattcgacaggtccgttaggctgatacgggatgacaaccgccgtgcgcacatattgagactgccttacatgtacttcgatttcctccagctccatgcggtagccgtgaagcttaatctggaaatcaaggcgtccttggcagaaaatctgaccatcctgaacataaccggcatcacccgtgtgatatgcccactggccgtcgatcgggaaaaacgctttttccgtcagagaaggctctccgagatagcctttgcttacgctcgggcccgcgatgatgatttcccctttttctccgtccggaagcttattcccgttttcatccatgatgaagatatccatatcgggttttgcaaaaccgacaggcagagattcatgttcatcgatgatctgctgcgtaatttcaacggaggtgacggcaaccgttgtttcagtcgggccgtatgtattgaatacgcgcgccttcggaaaacggtttaacagctcctgtgccacggcagccggaagcgcttctccgcaaaacataaatacttctgcctcaggcaggagttcctgcgtaaagccggggtccatcagacacatttggacgaaagacggcgtcgatgtccagacgttcagtttggatttctccaattcttcaaatagtactttcggtttattgattttgtctttcgttacgcagtgcagcgtacctcccgtttgaagcgacgggaaaatgtccatgaccgataaatcaaaagaaaacggagcttggtttaagaatgtcttaccctcgcccacaggaaaatccctgcagatccagtcagtgaagctttgcaggttatcggccgatatctgcacgcccttcggatttcccgtgctgccggacgtgtaaataatgtaaaacgtatccagctcttttacccagttctcacggctgaggtctgcatctccgtcagctgcaagctcttcgggcgtaacggttttaatcagattgcttcccgtatcgactgcatcgcccgatacgctgataagcagctctgcgcctgagctttcaatgattttgacgatccgctccgccggaatggaaacatcgacagggatgtaagggcggcccgctttgacgcttcctaagaaagaaacgatcatattcggctccatatgtccgtaaaccaggacaggcgctttcgaaccgtcagctgtatgtttttgaatgccggaagcaacccgctccgacaaatcccataattccccgtaagtgagggaatgatctaaggaacgaaacgcttcggcctgcggcttggcgtctgcgtatgtttttatagcatcaagtagtttcatagttatcctccccgattagaaatcgttgtaaatataagtgccggtattcgctgtatgaaatccatacatccaaaagagcaatactaatatcagaaaataaaagcccgtatgaaacgtccatttgatcaatgtattttcataagcacgttttaatttttgcatcatattcaaaattccttccccgcgtattcaataattacaccagtatatgacgattagattaacaaaaagtttcaaaatatgtctaatatcctaagcttaaaatttccttaaaaatgaatgaggaacaaaaggatggaaaacacgcatgtataaattggcaaatgatcatactaaaaaggcgctgttcaggcgggatttttaacttatcgtaaatataaacgaggtaaaaaaattttggcggctttttcttaagcaggcttgtgccgaaccccaatggagaagggcgaaaagccgtttccggcaggatagccgataaagcgccgcatcttgtgaaatgaggaagaaattattatgatagataaggtagcagaaacgtgaaaaccccaattcaacactactgttatcggctgactgtgaaagccttttaatagaaaggaagaggaaaatgaatcaaaacaatatggggggcagccaaaagacgcccgagaaagaaagcatgggccgcattttgtggcagctaacccgccctcatacattgacggcatcgtttgtgcccgtacttctcggcaccgtattggcgatgttttacgtaaaggttgatttcctgctgtttttggccatgctgttttcctgcctttggatccagatcgccacgaacttattcaatgaatattacgattttaaacgcggtttagatacggaggattccgtcggtatcggcggagcgatcgtccgccacggcatgaagccgaaaacaattctgcagctggcgctcggctcttatgcgattgccctcgtgctcggtgtttatatctgcatgagcagcagctggtggcttgcggctatcggccttgccggcatgctgatcggctatctgtatacgggcggcccgctgccgattgcgtatacaccgttcggggaactgttctccggcatttgcatgggctctgtatttgtccttatttctttcttcattcagacaggcagaattaatgaacagagcattttgatttctatcccgatcgctatcttggtcggagcgattaacctgtccaacaatatccgtgatattgaggaagataaaaaaggcggacgtaaaacgctggccattttgatggggcatagaggggccgtcatgatactggccgcatcatttgccatcgcttacatctggatcgtcggtcttgtcatcatgggttacacaagcccgtggctgttcctggtcttcctgagcgtgccgaaacccgttcaggccgtgaaaggctttgtgaaaaacgaaatgccgatgaacatgattattgcgatgaaatcaacggcgcaaaccaatacattcttcggattcctgctttcaatcggactcctgatcagttatttccgctgatcaaatgaaaggcaaatgccataaccggcatttgcttttttttatgacataatcttcacgattttgtaaagaacctgactgaggactgacacgtcttatatacggacagcaaagcaaggagatgaaaaaaatggacttgtcaacagcccatatggatgatttgaaaacggtcatggaagattggaaaaatgaattgttagtttataaattcgctttagatgagctggatacgaagttttctatcatcagccaggaatataatctgattcacgggcataacccgatcgagcatacaaaatcacgcgtaaaaagtttcgagagtatcgtcaataaattgatgcgcaaaggctgcgatgtgacgacgcaggaaatgaaagagcatattcatgatattgcgggtgtcaggattatctgttcctttatttccgatatttataatgtcgctgaggttttgaagcagcataaggacctgaagatcgtaaaggtgaaggattatatcaaacatccgaagccgaacggctaccgcagcctgcatttgattattgaaattcccgtttatttgacgaatcgtgtggaatatgtgaaggcggaaattcaaatccgcaccattgccatggatttttgggcgagccttgaacataaaatttattacaaattaaataacgaagtcccaaagcatctgaccgacgagctgaaggaagcggcggacatcgcccattatttagacgaaaagatgcttgggattaagaaagaagtcgattaaacgattgacccatcacaaccagccggaccgctattatacgcagtccggctggttgtttttatgtttacgtgttttcgctttcccgcgcgatttattctgacgatgattcaggctgaaatgctgattgaatttgaacagagaatgcaaaagatatcaaatcgcaaacagcacattcccccagaaaaaatgtgtaagatcaaggtttacttttaaaaaaaagggaaagacatttgtacaacaaaaagggagatgaatatcagtgggaaagaatgaaacaatgcatatcgtatcatgtgccgatgatcattatgctcgtcatttgggtgggatgttcgcttctttattgatgaatatggataaaacaaggaatgccaaattatatgtgatcgacggcggaattactgccgaaaacaaggacaagcttgaacagaccgcgatgtcattcgggacgccgcttgaatttttagaagtagacgctgatcaatacaagcatgcagtcgaaagcagccacattacaaaagcggcttattaccgcatttccatccctgatttaattaaggatgagtccgtaaagcggatgatttacattgattgcgatgcaattgtgatggaagatatttcggttttatgggatttggatatttccccggcaatagttgcggcggtagaagacgccggacagcatgaaagactgaaaaaaatgaatatcagcgacactgccaagtattttaattccggcattatgattatagatttcgaaccttggagaaaacaaaatatttccgaaaaggtgattgattttatcaacgaaaacagctcggaggattttctcgtgttccatgatcaggacgcgcttaacgcgatcttatatgatcaatggcatgaactgcatccgcgctggaacgcgcagacgcatattatcatgaatgagaaaacgcctcctgaactgatcgaccgtatacgttacagagaaacacgtgccgaaccggccatcgtccatttctgcggcagcgacaagccttggaatacaggcacctcgcacccgtatcgtgatcattatttccgatatatgtcctttacgaaatggaacacgattgaccgcccggccatgaaccaataggcaggtatgatgaaaacgcttgtgaagccgttatccggctcataagcgtttttttttattatttcacccgaatcgcacgcatgcgtttttgcaggccggtcttttcggcagacggcttcaatcggctgactgctgtttgcgccgctgattttgcttttttcgtcttgtttttttccgcggcttttactttgtctctagcctgctgccggttgagtttatcttttatccggccaagccgtttttccagagcagttttttcttttcccggctggatttcgctgactgctttttgggcttttgcggtgttggcctcagaggtctttttttccgcctgcttgacgctggcctcagctgttttcaaaaggcttgagttgacagcgttcagccgtttttgcagcccttttttctctgaaccggccggtaatttgcgaatggcgctttgtgcggcattgacggcggtttttttcttttgtttttcggcagtccggactttgtctcttgcgtccgtcacatttcttgccgtctgaactttattgatccgggactcgagagcggtttttccctttgacttggacagcttgctgacggccgtttttgcttgattgatatctgcctgttttttcgtcttttccgcttttattacagcccgttcggcaaagctcttttgctttacgtgatattgcaccaggccgtacccaaatcggctgtcacgtccgggagcgcccagatctttgacgttttgctgcatctgctgccggagctgtgtatttgtttcctcgggatatttttgcctgagcagcgcgaacatgccggtgacgtgcggtgcggcttgagatgtgccgtcagctacggcgtacatttgattcaggtacgtgctcgtaatattggtgccgggtgcggcaaattcaatttgttttccggtcgtggaaaaagccgcgagcccgtttttttcagttgacgctgagactgccgttacgctgctgtaggcgcccggataattgacgggttttttgttgccgtcgtttcctgcggcggctacgatcacgattccttttttgtatgctttatctacggcgtcgtgaagaattttgctgtcagcgttagttccgagactcatattaatgatgtccattttgttggcgatcgaccagtcgatcgctttaagaaggcttttaagatcccccgcaccctttctgtctaatgctttaaccgcatataaccggacatccggcgcgatgccgtcaatgccgtatccgtcatgtttggccgcaatgattccggcgacatgcgtcccgtgtccgttgtcatctttgtatgaggaagtatagctgactgcggaatagcctccggcaatggaaaggtcatcatgagggtaaatgccgctgtcaatgacagccactttcaccttttttcctgtcaagccttctttccacgcctgcttgacctgagtcggttctatatcccattgcggcagcgcgtaactgctgctttgggccgctgataacgggcggatatcagaaccgcctgatgcctgaaaagatacattgtcttctacatataagatgtcagggtcctgtttcaggtctttcaccgtttgtgaatcggctgacacggcgactgccgggagatgctgataggtctgttccacatccgctccgctgtctatagcggattccttgccgtcttgatttttgtacaccacgataacgtcccggtcgtgcgtctcggcgtgcgcgggcgccgcggcggagaacaggctgacgcacaaggccgcggccattatcggtttcagggtgtgatacattgcaattccccctttttctttatatatcggcagtgcggaattctttttttcctaagggataaggaaaatttctgtatgcaaatgtaagcgtttccaaaatatgatggagaaaatgctttaagacatctgcgcaatgaactcaaaaagggggtttttgataaatgagtaagttcaatcgggtcatggaagaaaaaatcatgcctgttgccggaaaagtcgccggccaaaggcacttaagagctttgcgggacggcattattttgactatgccccttatcatcataggatcggtttttctgattctgacgagtcttccgattcccggttatgccgattttatggctggtcttttcggtgaaaattgggttgaaaagctcgggtatcccgtgaatgcgtcctttgacattatggcgcttgtcgccgcctttgggattgcttaccggcttgcggaaagctatgaggtggatgccctgtcgtcaggagccattgcccttgccgcctttttattggcgacgccgtatcagattccgtttattcctgacggctcggcaacagagattatggtgggaggcggcattccgatttcgctgctcggaagcaaaggtctgtttgtcgcgatgatcattgcaatgctgtctacggaagtgtaccggtttatcatacaaagaaatatcgtcattaagatgcctgacggagtgccgcctgcggtcagcaaatcgttcgttgcgctcatccccggtttcattattattacgcttgtatggctggcccgtctgtttattgaaataactccctttaaaagcctccacaatgtcgtaggcgatctgctggggaccccgctgtctattctgggcgggagtctcggcggaagtcttatcgccgaattcgtgcaaatgctgctttggtcgtgcggcatacatggcgcgtccattatcggcggcgtcatgtcgccgatctggtacggggcgatggacgccaaccgtttggcttttcaggcgggagaagcgctgccgagcatttttacgacacagttctttcaaatatggattaatgtcggcggaagcggagcgacgcttgcccttgtgctgaccatgcttgtgcgctccagaagcaaacagatgaaacagctcggccgtctcggcatcgggcccgcgatttttaacattaacgaaccgattattttcgggatgccgctcgtcatgaatccgctgttaatcgtgccctttatcattgcgccgctcttgaccattacggcgacgtacatcgggatgagcacggggatggtggcaaaaccggcgggaatcgccgtgccgtggacgatgccgccgctgatttcaggttatttggcgacgggcgggaaaatctccggttcggtcatgcagctgatcaatctcctgattacatttatcatctattatccgtttttccgaatttgggatcttcaaaaatggagagaggaacgggcggcggaacaaaacgtcactgaagaaacataaaaaaacgggcgccttcgcccgttttttttaacgctggaaaaattcgatccattcgccgtcaggtccttcaatgtaaaagtagcggtacccgttcggaagcgtcgtgatttcttcatcgataaatacggcgccctgacgcttcgcatgcgtgaactccgccgcgatatcttcagttaataaagcgatgtgatgcacttttccttctgcgggaagctcgctgctatagccctggatcagctcaatttctgtctccggcccttcttgaaagccgagaaaggcaagttcaataatgccgttcgtatgagtgatacgatcctttaactgcataccgagaacgtcttgataaaaggcgatggatgtttcaatatctttgaccataatgcctgtatggtcgattcttttggctgtcatggttttccccctgttttgaatttttcgggacaatgcggtgttgatcatgttttatggtacgataagagaaagcaaaacgaaagaggaatgcacaatgaagctacttacagtgaaagatacatttgccggaaagctgaaaaaaggattccccctgattgaaaaagacgctctgtccggaagctcggctcacttaacagagggcgatctttttgatgtgacatccgagaagggtgagtttatcggaaaaggctattacggcttgcagaataaaggagtcggctgggtgctgtcccgcgcgagagatgaacggatcgacggacgtttctttctggacaagctgaaaaaagcggctgaagcaagagcccatctgtttaaggcgcccgatacgacggcgttccggctgttcagcggtgagggcgacggcatcggcggcgtcacgattgacttttatgacggttatctgctgattcaatggtacagtaaaggcatttacgcttataaggacagcatgattgaggcgattgacggactggagctttcatataaagcgatctatgaaaagaaacgattcgatacggccgggcaatacgtggaagacgacgattttgtcaaaggtgaaagaggagattttccggtcattgttcaagaaaacggcatacagtacgcggtggatttaaacgacggggcgatgacgggcattttcttagaccagcgtcatgtgcgcaaagcgattcgggataagtatgcaaacggcagacgggtgctgaatacgttctcttatacgggggcattttctgtcgcggcggcgcttggcggagctgagaaaacgaccagcgtcgatgtcgccaaccgcagtctcgcaaaaacgattgaacagttcagcgccaacggaattgattatgaggcgcatgacattaaagtcatggatgttttcaaatacttcggctatgcggagaaaaaagggctggagtttgacctcatcatccttgatccgccttctttcgcccgcacaaaaaaacggacgttcagcgcagcgaaagattataaaaacctgttgaaggaaacgatcgccatcactgcaaaaaacggcatcatcgtcgcttcgacaaacagcagcgccttcaatatgaagaaatttaaaggttttatagagaccgcctttaaagaaacaaatgagcgttacgacattttggaagaatacacgcttccggaagatttcaaaacgattcccgcgtttaaagaaggaaattatttgaaggttgttttcttgcggaaaaaataggatgatcatttatagcgtggaaagaggggaaaagaaaaccctcttccatcgctttaatacgggataaaataatcttcatatcttactgtttaaagaaacaacccgctattacttagtatctcatctgtgccaagtaaagtggcctctctaatccccacattgttggctttcatgaaggattgcaccgcttggtagccaaccgcataacctgcaaacggtgataagccgacaggctgataaccttgttcggctgcaaaggtgtcaccaaacatgtaactgctgacctcagcaaaccctttcacatttaatgagtctttgataatttcttttgagtattctaagtcttctttttcaaaagaagtaacccagggacctaacagagcttctccgtaaagttctttggcaaacgattctgccagcccctctataattaagtaatcaccaaccgttacgttcccatagtcccaattgaaatacgaaaaacgaatattatgatgaaattcatgtgcgattacagcaggcagtctcggtatgttatatgaattggggaatattgaaacttgaataaatcccggaattcctccgaatccacaataccctctatgtaattcaagctttttttgattagccagatacatcccaaaccttatttcatcagcatttatttttaagcggttttgtttgataaattctacacaatgagttaaagtgccatatgcaatttgaagagcttgaatttcttttagattctctaatgcttttcttccggtttccgtatcaaatatgctcagatagcccagcatatttgaagccatgattacatcatatccgttaggttcctttgcctttaagggaacattcatctttttccacatatcttcaaaaggtttcatcattgaataccgataataatcttctctattttcaatcattgaaaataacgtttcgtattgcccaattgtatcctcgataatgattttaatgggcatcaccctttttttgagtatctatataaattgtaatggcatcactcatgagcttcgccaacccttcaccataccggtcgatgttcttagtgaagcgttcatcttcaatatagagttgacctaatccgtaaaaggcatcaaaagaatattcaccaaaattttcattgagaaaatcaaaccactctttgatagcggtttgtacgtctggggactcaggagattggttaataaggagtgcaaatttattgaacattgcagtccacttatcagataaatctttttgctcaccatcagtcatgtttttcaatctaatatttaccttatcgacaggttgatcaccccaccgtttgcgggcttcttgttcataaagattatcattaaagttaattccctcaaaccgctctttgttcgtcatgcaaatctctcccatcatatgtttgattgatttatcgatggtttcaatcatcttatcgactctattccgtttctcaatcagcattttcttttgtaaaatgaatgcctcccttcggttaaatgaaggattagtaatgatttctttaatctcttttaaggagaaatcgagctccttgaaaaatagtatctgctgcagctgttcaagattctcttcagaataaagccgataaccggaatcggtcgtttcctgaggagtcaataatccaatttgatcgtaatgatggagagtgcgtatgcttactccaatcagttcagctacttcttttactttcatacccatacgtttgccgcctccttaatggctactctaaagtattacgcaacgtaagagtcaatagttggttaaaaattttttgtatataaaggggaacatatgaggagttcattgctgaaattaaagaaaaaaagccgggcgtgaagctccggcttttttctattcaataatgtgctgcacccggccgattcgcccgtcttcaaggcggaccttaatgccgcgcgggtggaagcttgagttcgtcaaaatatccttcacgatccctcttgtcagctttcctgaacgctgatcggctttcaggacgatatcgacttcaagtccttttctgatgctgcttcgctgctggccgttcatatgacacatccgttcttcagtcttttcacttcatgtcttatcatatcgtgttttcgtctttttatgaaggacagacaaatcaattcttcatggcaactaaaaaaagaccgctctgtaaggagcagtcttttatgacataaacgaaagcaaaatcggggccgcgcacagtgtcataatcgcggcgaggatcatcgacacgcttgagatcgttcctgatacggagctgagctcaaatgctttagatgttcccgctccgtgcgcgctagttccgagcagcacgccccgggcaatttcgttatcaatgcggaaatagcggatgaccatcggcccgatgatcgttcccaataaagccgttaaaatgacgaaaaccgctgtaacggccggcatcccgccgatcatttctgaaacgttcatggcaatcggcgtcgtcacggatcgcggcacgagactgtcgactaagctgctgccgagatggaaccattttgcgataaaggctgttgacaaaatggcgatacatgaaccaaccgctacgttcaaaataatttccacggcgtatttctttaaaatcgggaaatatttataaagcgggatagcgaacgccactgttgccggctgaagcatatcggtcagcagtccgccgccgagattgtatgtctgatacgggacattgacaagaagcagcagtacgaccaaaacagcgggcgtaatcagaagcggcgacgtatacacccgaggaaaacgaatgtagagttttttcgcgcccaaatatactaagacagttaagaataaacttatgattccgatgaacacgtttgttttttctcctttctttttgctatcagctgtgtaagcgtacctgttgaaaccatcacgacaaatgtgctgatgacgacgacaagtaaaatgcttacgccgaacttagacataatatctccgtattcaatcactccgacggcagacgggatgaaaaacagcagcagctcaccgaggagccatgctgcgccaagctcaatccattcaagtttgataatcttgaaatgcaataatgtgaaaagaatcacaatcccgattatactgccgggaatatttatatgaagagccgccgtgacccaattgatcagacgcgcaaatataaacagcagagcgatttgaataacggtaagcagcaattttttcataatgatgcctcccttatatttatattgtacagaaggttttgctataggtaaaatacatataaagaataatgtgtattccttttgtctatagaaaggatgaaatgtaatggatatccggcacttaacgtatttcttggaagtggcccgtttgaaaagctttacgaaggcatcacagtcgctgtatgtttcacagccgacaatctcaaaaatgattaaaaacctggagacggagctcggcattaagctgttttaccgcaatggccggcaagttgaactgactgacgccgggcagagcatgtatgtgcaggcgcaggaaatcacaaagtcattccaaaacctgacgtcagagctgaacgatattatggaagtgaagaaagggcacgtccgcatcggtcttccgccgatgatcgggtccggctttttcccgagagtgctcggtgacttccgcgtcacatatcccgatgtgacgtttcagcttgttgaggacggctctattaaagtgcagcaaggggtggaggacggctcgcttgatatcggggtcgtcgtgcttcccgcgaatgaagagatttttcatacgttcacaatcgtcaaggaaacccttatgctcgtcgtccatccgtcacatcggctcgccgacgagaaagaatgcagtcttcacgaattgaaagaagagccgttcatatttttcagggaggattttgtccttcataatcgaattatgacggaatgcgtgaaagccggattcaggccgcacgtcatttatgaaacgtcacagtgggactttatcagcgaaatggtatccgccaatctcggtatcggcctgctgccggaaagaatctgccgcggtcttgatcctgacaaagtcagaaccattccgctcgttcatccggttattccgtggcatttagccatcatttggcggaaagaccgctatatgtcctttgccgccagagcctggctggagcatacgaaatcgtatttatggaatccgaaaaagagaaaaaaggatgattaagcatggacgcacaaaccgcagctcaacacttgagtaaagtgcgggatcaaaacccgctcgttcacagtatcaccaataatgtcgtcacgaacttcaccgctaacggactgctcgcgctcggcgcatcgcccgttatggcttatgcaattgaggaggccgccgacatggcgaaaatcgcaggagcgctcgtcctgaatataggcaccctcagttcggcgtcggttgaagctatgattgcagccggaaaatcggccaatgaaaacggtgttccggtcatttttgatccggtaggcgccggcgccacgccgtttcggacggcatcagcccgcaagatcatacaggaggtccgcttgtccgccattcgcggaaatgccgcggaaatcgccaatattgccggcgcccctgattggaagataaaaggcgtggatgcgggggaagccggaggagatgtggttcacctcgctaagacggctgcaagcgggctgaagacggtcattgcgattaccggaaaaaccgacgtcatctccgacggcaccgacacatacgccgtacataacggtgataaactgctgacgaaggtgacgggggcgggatgcctgctgacgtctgtaatcggagccttctgcgcagcggagcaggacgttctgcaagcggccgtttcagccgtttctgtatacggaagcgccgctcagcttgccgctttggacacctcccaaaaggggccgggcagcttccagattgagcttttaaacaagctggcaagcatctcagaacaagaagcggccgagcttgctgcaattgaaagggtgacagaaaaatgacgcgtatttctcgggaaatgatgaaggatatgttatcggtttattttattatgggatcaaacaatacaagcgcagaccccgtttctgtggtgaaaaaagccattgagggcggcgctacgctttttcaatttcgggaaaaggggagcggttctttaacaggggatgaacgtgtcctgttcgcgaagcaggtgcaggatgtctgcaggcaggccgggattcctttcatcattaatgatgatgtcgaattggccttgcgccttcaggcggacggagtgcatatcggacaggatgacgcagacgccgaagaaacgagagcggcaatcggcgatatgattctcggtgtgtcagcacataacgtctccgaggtgaagcgggcggaagccgccggagccgattacgtcggaatgggcccggtctatccgaccgaaacaaaaaaagatgctgaagctgtgcagggcgttacattgattgaagaggtaaggcgtcagggcatcactattccgattgtaggaatcggcggcattacggctgacaacgcggcgcccgtcattgaagcgggggcagacggcgtcagcatgatcagcgccatcagccaagccgaagatccaaaagcggcggcgcggaagttttcagaggaaattcagcgctccaaagcagggctgtcccgatagggcggccctttttctgtgtgcgcaaaaaggcagtgacggacttggagaatataagccgtatgtcaagaacagggcaatcagcttgcaatatcgaccgaagtgtttgacggctctatcgctttgctcaaagtgatgcctgaaccaatcaccgccggcgccgaaggcttaaaagcactctatgaaccagtaaaaagcgcgcagtgagagatcatttcgaggtcacggaaaaacttgatgcggaattcagcgaatttgaagttttgatgtcgaaatcaaaacgtgcgatcaatcgtatacgtcttgtgatacattaagtacagatcaaatcagagagataagcacgaagctgacggccctttctgaaaccatggcgaagattgccgatgtgctttaaaaggagttaagacacagcatgagtgatgaacaaaacaaggaaaaacagatccacagacgggatgtcctgaagtggggcgccgtcgcgggcgccgccgtcgctgtcggagcgagcggcctcggaggactcgcgccgctcttcaaaccggcggccaccgcttcaaagaagaatgatgaaaaaagtgatcgtgatcaaatcgttcctttttacggaaagcaccaagcaggaatcacaacggcgcatcagacgtatgtgtattttgcagcgcttgatgtcatgtcaagcgacaaagccgatgtcatctcccttttcaaacaatggacaagcctgacgcagctgctgacttcaggcgccgtcccgtcgggcgaacagaaaaataaatatatacctccgcaggataccggggagtcgcaggatctggccccggcgaatttgaccgttaccttcggcttcggccccgggtttttcgagaaagacgggaaggaccgcttcggactgaaagataaaaaaccgaagcacctcgccgatattccgccgatgcctaacgacaagctcgataagaaacaaggcggcagtgatatcgtcatacaggtctgcgcggataatgaacaaacggcgtttcacgcggtgcgcaacctgatgaaacaggcagcaggcgtgtgcgaagtccgttttctcaataaaggtttcttaagcggcgggaaaaacggggaaacgccgcgcaacctcttcggattcaaagacggcaccggcaaccaaagcacaaaggatgaaaacctgatgaattcgatcgtttgggttcaatcaggagagccggactggatgacgggcggcacgtacatggcgtttaggaaaattaagatgtttttagatatatgggaccgttcatccttgaaggaacaagaggacacgttcgggcgggtgaaaagctcgggcgcgccttttggacaaaaaaaggaaaccgatcccgtgaagctgaatcaaattcctgccgactcgcatgtcagcgtggcaaaatcaaccggcagacagatcctgcgccgggcattttcctatacggacggaattgatccgaagacgggctatgttgacgcaggcctgctgtttatctgttttcaaaaagacccggaccgccaatttgtcccgatgctgaaggctttggcggcaaaggatgcgctgaatgaatacacacaaacgatcggctcttccttattcgcctgtcccggcggctgtaaaaaaggagaatatatcgcccaaaggctgctggaatcgtgacaccttccatatggagggtgttttttaaaaaacacttgtaactatatatgttacaacttaaaatgaaaaggaaaggagacttacaatgacactgcagattaaagtatattctgattatgtatgtccgttttgctttgtcggcaaagcggcgtttgaagaagcaatcaaggacaaggacgtacaggtggaatggatgccgtttgaattgcgtccgagcccctcgccgaaacttgatccggtgaatgatcccgccaagcggcagatgtggaaaaactccattgagccgatggcgcagtctttaggcgttgaaatcacgttcccccgcgtgtcaccgcatccttacacggatttggcatttgaaggctttcatttcgcaaaggaacatgggaaaggaagcgaataccatacacgcgtttttcaggcgttctttcaggaagaacaaaatatcggtgacgttggcgtgctgacaaagcttgcggaagaagccggacttgacggcgctgccttcaaagaggcgcttgagacaagagcgtacagacacgtacagcgggaagcgctccgccatgcttatgaggaagccggcattacggcagtgccgacgtttatcatcggcgatgagagaatccctggcgcggcgggaaaggaaacctttgaacaaatcattgagcgggaactgaataaacgttaacccgaaaaaagccctctcgatcagcgagagggctttgccatatagtgtttgacaaatgtttgtctgtccgcttcataagccgcggcgtcaaatgagtcgccgcaaaaatgaaggcaccaagggtctttttggcaggcgacgccgacttgatagccgtgtttttgaaattcaagcgactgtgatgtgtcgtaaaaatgaaagccgcgaaacaaatcctcccgccacttcacgtcatattgagccgccattaacaagccgtcaatggcgtcaacgggcgtaaacaggccgtcttcatcaccgtgctcaaagaccagcgggtgataagcattcccccggtattcaatcacttttcccatccgctctccgctttcccaccaaatgccgttcggcggcagggttttgcagccggcgacaccgagaaggccgagctcctgatgagattgaaagatatgaagcatgtcatgaaggaaatgctgatgaatgataaaggtatcctgatgcagataaattttatatttggaggggtgtctcagcgctttgttataggacgaggccatgcttgctgaatcgtatatcggcatgatatcaacggagtatgaaggggggacggtaagctgtatgatatggcttttgcaccgggagtacagcgactcgtcattcacacagacgacaaacagaaatgaatgtgaatccattacatgctcctctcggcctcaatcacatattgatacgccgatgcttctgtcataaagtcatgccttatgccaagctgtacgcatacttcgtgcaatgatgcggtggctttgtgataagaggggtgatcaacgcggatcgcttcaatgcgtttcacctcatagccggcggctttaaataatgaaagcgtctcttcacgggtaaaaaaacgcaggtgggtctgatccattaatccggcgtccctgtaagtccatttgccggctaaaagctccagcaccactgagatgtggccgacattcggtatgcacgcaagcaccgtgccgtctttttttacatacgggcgaagctttttcagcacggaccacgggtcgataagatgctcaagaacgtctccgaacagcatgcagtcgaattgttctgattcgtacggaagaatggcggattcaatgtcgccgcaaaggacgtggctcaatttgctttccgcctttttcgcggcttcgggatacgcttcaatgccgtaaaccgttattccgcggtcttcgatcgccgctcctaaattgcctgtgccgcagccgacatcaagcactgtccgccagttttcgtctattttgttcaataaataaggattcaggccttcgtagtagttctgttgtttttcatcataatagggattcgtatccatctgtgtatcacctcataaatgggcatatacacaagatatgcagcggggggatctcatatcaccatgtttggctgttcaattgcggaatgcggacgggaatggttgtccggtatacggtttgttctctgattcccctcttattgcggatgttcctttgaaaactcgggtgcgggcggactgtggcaggtcatatagtaaaaggatccgcctgtaatcttaccgctggcggatggtgtttttcattggtgtttttttcttcaccgctttttcagtatttaagaagcgcctcacatcgtcaatgtgcaaacccatgattctagcctcttgaattaacaattgccaatcttgatctatatctttcattacatgagttttcataagaacctccaattgaaaaattgatttgcccagctacagcagccaatgtataacaaatatcacacatagttggccggtaatcccaaattgaagatgaattcacctacctattccctaagaaaatgactgaaataaccaaaatccttcaagaattcttacgtataataataaacaaataaatactgactggatagtatgcaaataaaaataaatcatatgacctattaacatttaccctcaaagcgtcgactagcatattctttttgcataaaaaataccgcaaaagaatgattcggtgtaagataaagtgaatgatcaaacagctggggtaaaaaatgaaaaaaaacaaatttcaaattaagagagaagaaacatttgaaagttttattgacgcaggccttcatctcctgattgaaagagcttacgattcagtctcaatcgatgacatcagtaaagcggcgggtttcagcaaaggcgcgttttacgttcattttgaaagcaaggaagattttctgaagcatttgttagacaggcgtcagataaaaaaaaggatcatcactggctatctcgacgaattagaaaagcaaacagcacggccgttgacgctttgtgaagctgcggcaagcgcggccagcctgttgatgcggtttgtaaacagcaagcctgcctggaatgttgtgtcttttgccgttcatatgcctacttacaaagtcgtcagtgaatatgaagcttatatccgtctttataagttatggatagaagaaagcaccatgtacataaattggctcaaatcgagaaatttaatagaagaccatatagataccgagcataccgctaacatgatgtgcgcgctcatcgacgggatgattaagcaatccaatgtgctgggaaggccggttacattccgcagcatgtttgacgcgctctatgtttttgtcagcggcagaaaatcggggtaacgttcttcttgatttgacaaaaggtttagaaaagtctttcagaaagcgaggaactgccatgcgctacagagaaattatgatgtatatcattatggggatattcacgaccatcgtgaatatcgtcagtttttacattctgacgtcggcctttgagatggattacaaggcggcgaccgtcgcagcttggattctgtccgttctatttgcatatgtcacgaataaactgtatgtatttcagcaaaagaccgcggggatgcggagtctgatgaaagaattgacggcctttttcagcgtgcgggtattgtctctcgccatcgatctcgccatgatgattcttctggtcagtcaatttcatatgaacgaaacgttggcgaaaatcgccgataacgtcattatcgtagtcgtcaactatgcggccagcaagtggattgtcttcagaaaagcgaaagaagagggcgtgtcataacggtttctttccgcaccccgggggaaagtgtaatggtgaaaggggatgcgtatgaagcacaaaataaagaaagcgtttgctgatgtattcggggaatcggaggacctgcgcattttctttgcgcccggcagagtgaatctcatcggagagcatacggattataacgggggccatgtctttccgtgcgcgctgacgatcggtacatatgcagccgtccgggagagaggggacaggctcgtcagaatgtactctcatcaatttaaggaagcgggcataaaggaatgcagtctcgatgatatccgttatcaaaaagaggacgggtgggccaactatccgaaaggggtcatggcggaatgtctcggcagcggtttttcccttccgcacggcttcgatattgtgttctggggaaatatcccgaacggcgcggggctgtcatcttcggcttccattgaacttgttacggcggtcattctcaaggaatgccatgagcttgaggcggatatgctcgacttggtgaagctcgctcagacggcggaaaattcctttatcggcgtcagctgcggaataatggatcaattcgccatcggaatgggaaagaaacatcatgcgattctgctaaattgcgggacgctcagctttgaatatacaaaactcgggctgtcggggctgtcgatcgttattgcaaataccaataaaaaacgaacgcttgcagactcaggctataatacgaggctcaaggagtgcggggaagcgctttgtgatcttcagaagcatctttccgttcaatcactgggagagctgaccccttccgcttttgacgctcatgcggagctgattcagaatgaagtgaacagacgccgggcgaaacacgccgtctatgaaaatcaccgcacaatagaggccgccgacatgttcagtaacaatcagcttcatcatatcggtgaattaatgagggattcgcatctctctttacgcaatgactacgaggtgacgagtcatgagctggatacactggctgaagcggcctggcgccacggcggggtgatcggatcaaggatgactggagccggtttcggcggctgtacagtcagtatcgtcaaggacgatgcggtttcggattttattgaaacggcaggagcccgctatgaggaaaagacagggagaaaagctgacttttacacggcggatgtcggagccggagcgagagaactaaagggggatgacgatggcaattgagcggcatgtggaacgtttaatccggtacggattgcaaaaagagctgatttcctatcttgatattgaatatacaagaaaccgtttatatgaagctttgcatatcacccatccggaagtttcagaacagaaagaaaatgaatcggcggcatcattgccggacatattggccccgatttatgaatgggcggcagaaacgggccggattgcagccgatacagacacctatcgcgacctgctgagcgcgaagatcatgggctgctttgccccgcagccgtccgagattgtccgtcgttttgaagaaacaaaggcggtgcacgggccggagcaggcgacaaaggcgttttaccgattttcagaggatgtgtattatatccgttcggacagaataaagcggaatgtcgggtggacggctgagacggcttacggaaagctggacatcacgatcaacctttcaaaaccggaaaaagatccgaaagcaattgcggctgccaaagagcagcctcaatccgattatccgagatgtgttctttgtaaagaaaatgtcgggtacgaggggagaccggatcacccggcgcgtcaaaaccttcgtgtcattccggtgattctcggcgatgagcagtggtttctgcaattttctccgtatgtgtattaccgggagcattgcatcgttttgaaagaccggcacgaaccgatgaagatcagcaaaaaaacgtttgaccggctgctgtcgttcgtcagccagtatcctcattattttctcggttccaatgctgatctgccgattgtcggcggcagtattttaagccacgaccattttcaggggggcaattatgaattcccgatggcgcgggcggagacagaaagccggtacaggctgcctgactatccgaaaacggtgttgggaattgtgaagtggccgatgtcggtcatccgcctgcaaagcgagagtgcgtctgagctttccggcgcggcggatgccatcctgcgggcatggcgcggctattccgatgaggcggctgatctcctcgcctattcaggagaaacaccgcacaatacaattacgccgattgcccggcggagaaacggtttattcgaattagatctcgtcctcagaaataaccgcacctctgatgagcatccgctgggaatttttcatccccatcaggaagttcatcacctgaaaaaagaaaatatcggactgattgaggtaatggggcttgcgattctgccgggccgccttgaacaagaaatgaaatacacggctgaagcgctgtgctcaccggacccggaagcggtcttaacggcagacccttctgcggcagcgcataaagattgggcgctcagtgtgctgcataagcggaagataacgaaagaaaacgcggaacagattctgaaagaggaaatcggccatgcctttgcgcggatactggagcatgccggcgtctttaaacagacagaagaaggcagagcggctttccggcggtttatccgccatttgggcgctctaccggaaaaaagccccatcccataagggacgaggctttttttttatcctctgcttctggcgatcaggctgaataagaataccacgatcgcagctccgatgattgccggaatgatggcaaagccggcaaggtgaggaccccatgtgccgagcagtccgtgcccgatccatgcgccgatcagaccggcgatcattgacccgatgattcctccgggcatactgccttttacaaataaacttccgatccagccgataataatagcgacaatcagagatacgataaaacccataaatatcacttcctattttttatttatttatgcctatatgttaccttcgttttgtccatattaaacatatgaatgcgttttttataatgaacatatcaaggcgcgttccggtcttttttttcacaatgcgttgcgttaaaatggaaaccgtgtgaaaaggtgtgagcaaaggaaaaaatatttcttttgtagaatgtttaacaaaatgaaactttttgttgaccagcgttttttattatggtaaacctttatttggtattattcgttctcactatcttttttctctatatatgctaaatgatctaaaactttttatgtttgatttgcgcaagtggaaaaagttcatgcattttttgacgattttgtgacattaggtcgaaaaaaagatgaactttagaaaaaaataaagctaataagggcagattttgatagcataacaaggtagatagagaaaagattttgagaaagtacatttcagattcactacatcaataggaaggatggtgatcttcttgttcagagcatttaaaccgttacttttaatagcgatgttggctgttgttttcgtactgggcggatgcagcgacatttccgttttagatccgaaaggacctgtagcagaccagcagaaagatctgattctcttgtcaatcggatttatgctgttcattgtcggcgtcgtattcgtactatttacaatcattttagtgaaataccgcgaccgcaaaggcaaagacagcggaaattacaagcccgagatgcacggcaacacgttcttagaagtagtctggacagtgatcccaattttaattgttattgcactttctgtgcctaccgtacagacgatatattcgttagaaaaagcgcctgaagcgacaaaggataaagagcctcttgttgtttatgctacttcggtagactggaaatgggtattcagctacccagagcaggatattgagacggttaactacctgaacattcctgtagaccgtccggttttatttaaaatttcttcagccgattcaatggcatcgctatggattcctcagcttgggggacaaaaatacgcgatggcgggaatgctgatggatcaatacttacaggctgacaaagtgggaacatatgaaggccgcaacgcgaacttcaccggcgaacactttgccgaccagaaattcaacgtaaaagctgttacgcaaaaagactttaacagctgggtgaaaaaagcccaaagcgattctccaaagctgacgaaagagaagtatgacgaactgatgcttccggagaatgtcggtaaattaacgttctcttctacacacttaaaatacgttgaccacggccaagatgccgaatatgcgatggaggcgcgcaaacgccttggctacaaagccgtatcaccgcactctaaaacagatccgtgggaaaatgtaaagaaaaacgaatttaaagtatccgacgataaacaagattgaaattgaacaagaaaggaggaagcccgaatgaaattgagatgggatgaattttttgtaacaggtgacccattaattctgggcgcacaagtttccattgcgctttccactatcgctatcatcgttgtactcacatacttcaaaaagtggaagtggctctggtctgaatggcttacgtctgtagaccataagaaacttggaatcatgtacattatctctgctgttatcatgctgttccgcggcggggtcgacggcttgatgatgcgcgcccagttagcgcttcctaataacagttttttagactcaaaccactataatgagatctttacgactcacggtacgatcatgattatcttcatggcgatgccgtttttaatcggtctgatcaacgttgtcgtacctttgcagatcggtgcgcgcgacgtagcattcccttacttgaacaacctgagtttctggacgttcttcgtaggtgcgatgcttttcaatatttctttcgttatcggaggttctccgaacgcaggctggacgagttacatgccgctggcaagcaacgacatgagtcccgggcctggtgagaacttctacctgctcggtcttcagattgccggtatcggtacgctgatgacgggtatcaactttatggtgacgatcctgaaaatgcgtacgaaaggcatgacgctgatgcgtatgccgatgttcacatggacgacgctgattacaatggttattatcgtattcgccttccctgttttgacagtggcattggcgctgttatcatttgaccgtttgttcggcgctcactttttcacgctggaagccggcggtatgccgatgctttgggctaacttgttctggatttggggacaccctgaagtatatatcgttatcttaccggcattcggtattttctctgaaattatttcagcgtttgcaagaaagcagttattcggttacaaagcgatggtcggctcaattatcgccatttccgtcctgagtttccttgtatggactcaccacttcttcacaatggggaacagtgcgtccgttaactctttcttctcgattacaacgatggcgatttcggttccgaccggggttaaaatctttaactggctctttacgatgtataaaggccggatcagttttacaacaccgatgctgtgggcgcttgcgttcatcccgaacttcgttgtcggcggggtaacaggggttatgcttgcgatggctgcagcggattatcaataccataatacgtacttcctcgtatctcacttccactatgtgctgatcgcgggtacggtatttgcatgtttcgcaggatttattttctggtatccgaaaatgttcggccacaagctgaacgaaagaatcggaaaatggttcttctggatctttatgatcggatttaatgtatgtttcttccctcaatacttcttggggctgcaaggtatgcctcgccgtatttacacttacggaccgaatgacggatggactgcattgaactttatttcaactgtcggagccttcatgatgggtgtcggattcttaatcctttgctacaacatctactacagcttccgctactctactcgcgagatcagcggagattcatggggcgtgggacgtacgcttgagtgggcgacttcatctgcgattccgccgcattacaactttgcggtgcttcctgaagtgaaatctcaagatgcgttactgcaattgaaagaagacaaaacggatattcatccggaaagcaagttcaagaaaatccatatgccgcacaactccggaagaccgcttattatgtcagtggcgttcggtattgcaggcttcggacttgtatttgaatggttctggatgggcattgtcggcttgatcggcattctgctttgcatggtgcttcgttcatttgaatatgacaatggctactatatacctgttgaagaaataaaagagacggaaagaaagatttccgaataaaggaggcgtgatttatggaacatgcagaacacggcaattctaacgcgcctatggaatatcaatctgaaaccggcagactcaatattctcgggttttggatctttttaggggcagagattgtgttgttctcaacactatttgcaaccttcttcgttcttcaaagaagaacagcaggaggagtcttaccggctgaattatttgaagtgaagcttgtcatgatcatgacattcctgcttctgatcagcagtttcacctgcgggatcgctgttcatgaaatgcgtcgcggaagtttaaaaggcgtcgtcatttggacgatcattacgcttcttctcggcgcgggcttcgtcggatgtgagcttaacgagttcatccactatgtacatgaaggagcatctctcggtacaagtgctttctggtctggattcttcgtccttctgggaacgcacggaacgcacgtaacgatcggtatcttctggattgccggcatcttactgcaattgaagaaacgcggattaacgccgcagacgtcttcaaaaatctttatctcaagtttatactggcacttcttagacgttgtttggatcttcatctttacaggcgtctatctcatcggattggggggactataatatggcaaacaaatctgctgaacacagccactttccgtggaagcatatcgtaggttttgcgttgtctattattctgaccctgctggccctttgggttgcggtatatacggaattaagcccatcagcaaaactctggatcattttcggattcgcatttatccaagccggtcttcagcttctcatgttcatgcacatgacagaaagcgaaaacggcggaattcaagtcggaaacacgctcttcggatttttcggagcgattgttatcatccttggttccatctggatctttgcggcgcactaccatcacggtgaccatatggatggaaaccctcctggcggtgcgaagcaacattccgaacatcaggaataaaaagaaaccctcttcgttcaggcgaagagggttttttgtgcctttattggcttcttctccggcgcaggcgcgggaggccgtaaatgataaaggcggcgatatgggcaacgatgacgttgacggcaaacaggatgatcataagtgtgtggccgagaggggataggctgctggttgcgtaaaagtagaagaaaacccacatgagaataattggcggtatggccgaaagagcgacttttttgttatccagccagataaagaggggtgttgcgcttgcgaccagtaaataagcaaaaaacatgtccatcttacatgtctcctttcattttatgggagcgtttccaaaatgaaatacagagagtgaaatgtgtctgttttgtggtcgttttttgaacattttgttacaattattataccatgttttccaatttttgataccgctttttcgagaaatgtattgcaactattgcctcatttttggataggtacaagaaaccggaaaggccaaataccctgtcacatttccggacaatggaatggcgcaggctgtgaacctttgctatggtcaaagaaaatatgcacagcaagggtggtttgaagtggacgtaaggaaagaagatgtcacagcgccggatgtcattgcgcttttacaggagcatctgaagagcatgaccatgcattctcctccggaaagtatacacgcgctcaatgcggaccggctgcgtcagcctgacgttacgttttggagtgtgagggaaaacggcatcctgctcggctgcggcgccttaaaggagctaaacagccggcacggtgagatcaaatcaatgaaaacctttccgcatcatgtcagaaaaggcgcagccaaccggatcctccgccatatgcttgaagaagcaaggcggcggggctatcagcggatcagcttggaaaccggttctatggaggcttttctccccgccagacgcctgtatgaaaaagccgggtttcaatattgtaatccgtttgcacattataaagaggacccgaacagcttgtttatgacgttaaacatagactgaaaccccttttctgacgagaaggggttttttatcggaaaagtttcgtcatgaccgaaacatttccttttctgacacgtcatatgtcgtgtagtccccaaaccgtaaaaaataaaaaggaagcaacctcatcatgttttcttgaacagtgttcatgtataataaacaatagtgacttccgatgaaaatgtaaggcgggatagaatgagtcgatataagaaacagcaaaatccctattatcagggggatttgatttttatatttggtgtgtttttaataattagtgttgcggcgatttatgcggccggacagtttgggcagtacggaagtgatgcctggatgagacagatcgtcttttatgtcatcggagccggtctcatggtcagtatcatgtattttgatttagagcagcttgaaaaactgagtctgtacgtgttaattgccggcgtgctgtcactgctccttttacgtgtggcgccggaatccatcgcgccgattaaaaacggagcgaagagctggtttaaaatcggcagcttcactcttcaaccttcagagttcacgaaaataggaattatgatgatggtcgcgtccattatatcgaaggcgggcccgaaggatcaaaggtcgcttcgggaagatgtgaatctgcttttgaaaattgcggcatggacggttattccgatcgggatgatcgtcttgcaggatgccggaacgggtgcgatctgtctgtttatcgttatggtgatggtgtttatgtcaggtgtaaactggaagctgatcaccatcatcggcggttcggccgcgctcgtgcttggccttttcttagttctcgtgattgaatttccccatgtggcgaattcaatcggcattgcggattatcaaattaaccggattacatcgtggatgtctgactccagtgcggcaacgactcaggcagagagcgataaaagctggcaggtggatcaggccgttatggcgatcggatcgggcggcattaccggaaacggcgttcataatctgaaggtgtacgtacctgaggggcagaccgactttatctttgcgattttgggtgaaagttttggatttttaggctgcgccattgcggtcgtcatgtttttctttttaatttacaggcttgtggtgctgattgaccgcttgcatgcgtttaaccggtttggcgcgtttttttgcgtaggatttactgcacttatcgtgattcacaccttccagaacatcgggatgaatatcggcattatgccggttaccggtattccgctgctgtttgtcagctatggggggagctcggtgctttctacattaatcagcttcgggatcgtatataacgcaagtgtgcagctgacgaaatataaaagctacttgttcaattcttaatgtgagacggctcgtttttcgggctgtctttttttgtttagagcatttcgcttttgacatgattccctttgggatatgatatagagagaaggaggcttttatatgaacaataccatcgaaacgatacttaatcatcggtcgatccgatcatttactgacgagcttctgaccgcagaagagatagatacattagtgaaaagcgctcaggcggcgtcaacgtccagttacgtgcaggcttactccatcatcggcgtaaccgataaggagaaaaagcggaagctggcggcgctggccggaaaccagccttacgtcgaaaataacgggcacttgtttgtgttctgcgctgatttgtaccgccataaaaaacttgctgaggaaaaaggcgaaaacattaccgagcttcttgagaatacggaaatgtttatggtcagcgtcattgatgccgcacttgccgcacaaaacgtaagtgttgccgcggaatcaatgggactcggcatttgttatatcggaggcattcgaaatgaacttgatcaggtgacggaagtgcttggtacacctgaccatgtgctgccgctgttcggcttggtagtcggtcatcccgctcatccgtccggtcaaaagccgcgcctgccgaaacaagccgtatatcatgaaaacacatacgatacgaatgaagaacacttccgcagttatatgaaggaatatgatgaaaccatttccgcttattatgataaacggacaaacggcaagcggattgaaacgtggtctgatcaaatcctgcagttcatgaaacaaaaaccgagaacctatttgaatcaatatgtaaaagataaaggttttcaaaagaattaagaaaaaacctctcctgaccgggagaggtttttttatgtttcacgtgtaacatatttcgacaaaatggaacaaggtatataaatgtttatcatcagggatgcttataagcatacagaaagaaaaaatggcttagcagtggtacgatgttgatgaggtgacagtgatgatttcattaagcatattagatcaatctcctgtatcagaagggagttctgcggaaagcgcgctgcggaatacagtaagactggcgcaggaggcggaaaagctcggatataagaggttttgggtgtcagagcatcatttttcagagcggttggcgggttcaagccctgaagtgctgatcagccatattgcggcgaaaacgaatgagattcgtgtaggctcgggcggtgtcatgcttccgcattacagcgcatataaggtggcggagaatttccgcgtgcttgaagggttgacgccgggcagaatcgatctcggattagggagagcgccgggcggaatgccgatcgcatcatgggcgctgaatgacggcgggaagcgtaacgctgatcaatatccgcagcagcttcgtgagctggcgatgtatttgcatgatgcagccgacgacaatcaccgttttccgaatctgaccgcatcaccccttattaagacggcgccggaagtctggcttctcggttcttcgggggaaagcgcgcttctgagcgcagaaacgggagcaggctatatgtttgcccactttattaatggagaaggcggagaaagcacgacggcacaatataagcgcagatttaaaccttctctattaggaaaagaaccaaaaacagccgtggcggtgtttgtgctgtgcgcggacacggaagagaaagcggaggaactcgcggccgtcatggattatacgctgcttgcgggtgaacaggggattccgcttcacggcgtaccgtcttacgaaaccgtccgcggcaatacgtatacaccgtatgaacaaagacgaattgccgataatcggaatcgaatgatcatcggaacgaagcagcaagtgaaagaacagattctggctctcagtaaagcatacggaacggaagaagtgatggctgtaaccattactcatcattttgaagataaacttcagtcatatcgcctgcttcgagaagcttttgccgattaatcaaaaagaaaccctgctgatgctccagcagggttgttcggttattcaatgataaaaggtttttcagtcagcacctggcttgatttccctttgttcgcggcataggccagcatataatattctcctgccggcagtgcggtgtcaccattgactttgccgttccagtcgaaatattgatagcctttatcctgctttttgtagatgccggcttggccgacaaagtcaagattgctgtcatatacaaggaaggcaagctcttcggctcccgccggaagataggtttcaatttggtaggttccctgcgttgtgccgtcctgcacgtcgattgacgtcacgcgcggatagtccggctcttttacaatcagcagcgtcggcacttttgcgactgtttttccgccttcacgcactgtgacggttccctcataggtgcctgcctttacttttttggcattgacctttactttcgcattgacctttccggtttgatgagcggggatcacgacccggtctgtgcccgaaacggtaatgcccgtgccgttgaaagagtactcgagctgatatgattttctgatggacgattggttttcaattgtaaaggtttcttttttcgtttcattgcctttgtctttcataaacgttccgtaagaataacttcccggggcgacaagggagtctgctttgatcgccttcatgattctgatgcttccggcgccttgcgcattatgcgggtatacgtcaccgtccgcgtccgttaaggtttccgcggtgttcatgagagcggcttttatttgttccgggctccatttcggtttggcctgcttgatgacggcagctgcgccggctacatgcggggaagccatgctcgttccctgcttcgatccgtagccgtacgggtcggccggatcatgtgtcggaatggtgctgacgatgtttacgccgggagcggagacgtcaggtttaatcatccacgtgtccataaccggaccgcgtgacgaaaagtctgccatttgttcagtgagcgatttagccacggataaattgaaagtcgcttttgtgccgcccgcttttaattggctgacgagtttttcgccgtcttctgatgaaagcttaatcgtcggcacggacatgcccggtacgttggcttcaatttctcccggggcattgttatacacaaccataccgatcgcgcccgcttttttggcgttgtcggctttatccacaaaggcgatgctgccccgtttgacgacagcgacttttcctttcagatctttgccttcaaaatccttttgctcgccgatacccgcctctatgagctctgtttcttttttattcagtgcttttatgtcatcttctttgttgtagcccattactttcgctgaggaataggaaccgaaggagacggcgtactcgttcagcggcagctgggtcgctccgacggagatcgcttctctggacgttcccggagagccgacggtccaattgttcggcccgctgtttccgtttgatgtaacggccgtgacgccttctgacatcgcccagtcaagcgccgtgcttgtcgcccagtctgggttattcacagaattgccgagagaaaggttcatgacatccgctccgtcctgtacggcgcgttcgatgccggcgatgacgttctccgttgttccgcttccgcccggaccgagcacacggtaggcaaggagtgtagcatccggcgcgacgcctttaatcgttccgtttgccgctaccgtgcccgcgacatgggttccgtggtcagtcgacgcgcctctcggatcaccggattgcgtttcttcaggatcgtagtcgttatccacaaaatcgtatcctttatattgtccgaaatttttctttaagtcagggtgtttatattcgacaccggtgtcaataatggcaaccttgacgcctttacccgtatagccgagcttccacgcgtcatttgcccctatataaggcgcgctgtcatccatctgcggggacacggcatctttagatagggtgatgtctttatctttgagctgatcggtatgataggtaacattcggataaaccgctttgacatcctgatcactcagcagtttggggatttcatttgccgggagtttcatggagaagccggaaaacacttgctcatattccctgttgatttttccgtgtttaacgattttgagcgccttctttttcacttttgcgcgttcgcttttcagcttgctttttgtctgtgctttaccgagttcctttgcttccgccagcgacttttctttcagctccacgatgactgtcgtttgtttgccggtggtcatatcaatgtcaccgaacacctcagccttctcaagatcaggagtttgcggttttgaagccggcacagcctgtgaacttgtggataaggtaaaggataagacaaaagccggaagcagataacggatgattccttttttcaatcgtgtttccccctttttctttatctaaattagaaatctagtatatatttcttgaaaattcaaaataatccttgtgacatatgactcatttatggaaattggtctgtgaataaggagggagttatacacagaatcctgtgcataactgaataaatttgtgtatatatattgttgggaacgaacgttcctatacaaaatatagaccgagtttgtggatatgtggatataccctgtgtttaagctgtgcttaaccaagggataaagtgtgtataactttttttatcggcttttccatttttcaggtcatttccatcagctttcaacaaaacttctgaaaactagtttgttttttcactcatattgtgacaaacaattcgaccggccgcgtctatcatagagtcatagggttgctagacccgctagtttttagcggagaaggatcggccgccttttccgttaaagcggagagaaaaacaggcctgcgaacaagctgtctgtcaaaaagaagcggagggatgatttgcaatgaaacgtttgctagtatctttacgggtgtggatggtctttctgatgaactggatggcgccgggtaacggaagatatccattagccgccgtgtacggaaaccaagcggcttatcataagaaagcgaagcggacggctggggctttttcgtttgtgagccgtgtccgatcggcggatttgaccgatgaaacaaaatcggcccgcggcaggctggataaaaaccgatggatgcctgtccgcaaagaattgccgaaacgggagcgcgcgggtccgacacctttacatcatatgaaaaagagggtacaatcccactaaacataagaacgggagcgaacctcttgagaatagacaaagtattaaataacaatgcggcgttaataaaagaagacggacgggaaaagatcgtaatgggtcccggaatcgcttttcaaaagagaaaaaatgatgtgattcaaaaacataaaattgaaaaaatatttgtcgtgcacgacgaaaatgaaaagttcaaacaagtgttagaaacgcttcccgaagagcatatagaggcggctgaagatatcatcagccatgcggagggagagcttgcggcacctttgagcgatcacatccacattgcgctggcggaccatttatcctttgcgatcgaaaggattcaaaacggccttcaggtgcataaccgattgcttcatgaaattaaggcgctttataaaaaagaatatgagatcggccgctgggcggttgaacacgtgaaacaaaccctcggtatatcattgcctgatgatgaggcggggtatatcgcgcttcatatccacactgccaaggcggatgccaaaagcatgtattcggcgatgaagcatacaaccatgatcaaagaaatgatcgaaaagatcgaatcctttttcgaacagaaggtggatgaagacagtatttcctatcagcgcctcgtcacgcacttacggtatgcggtcagccggttggactcaaatgaagcactccattccatggacgaggagatgctttatttcatccaaaaaaagtatccgtttgcttatcggtgtgcgcttgaactggcggcgtttttaaaaaatgaatatgatttggaactgccggaatccgaggccggctatattacgctgcatgtccagcgtctgcaaaaaaacccggaataacgcgtctgtttcgagaaacagactttttttttgaaaacatattgacgaaagcgctgtcatgaaatagaatgaaagcgcattaaaaaaactgaatccgcgggattgtgactggtaatgcaggcaagacctaaaatttgcgtacatgaaaaagggatcatgctgacctttttcgttggcgaattttaggtcttttttgattttagaaagggggatacataatgaattatcaagaaacggcaaaacagcttatcaaacatatcggaggggaatcaaatatcatcagcgcgacacattgcgcgacgcggctcaggctcgtcattcaagatgaacagaagatcagccaggccggcattgaagaaatagaaggcgtaaaaggggctttcagcagctcggggcaatatcagattatattcggcaccggcctcgtgaataaagtgtatgacgctttttcaaaagaagccgatttggggcgggaagatcgtgagacacatcaggacgcagcgaaaaaaaagctgaatccggccgcaagatttgcgaagacactgtctaatatattcgttcccatcattccggctatcgtggcaagcggacttttaatggggctgctcggcatgatgaaggcttttcactgggtgtctgaacaatcatcgctgtttaagcttttagacatgttttcaagtgcggcgtttatcttcctgcccgtatacatcgggttcagcgcggcgaaggaattcggaggtaatgcctatctcggtgccgtgctcgggggaattatgatccatccggcgcttttgaatccgtgggggcttgcggatgcatcacctgattttatgcagctcttcggcttcgacattgcgctgctcggctaccaagggacggtcatccccgtactgttagccgtttacattatgagcaaagtggaaaagggcacgagaaaaattgtgcctcacgcattcgatttattggtcacgccgtttgtcacggtgattgtcacaggatttattacctttatcgcaatcggtccgcttggcagggcgatcggatcaggcattaccgtctcgctgacatatgtgtatgatcatgcgggaattgttgccggactgcttttcggcggtctttatccgcttattgtgcttaccggtgtgcatcacagctttcatgcgattgaggccggcctcatcgctgatttgggcagaaactatatccttcctatctggtcgatggcgaatgtcgctcagggtgcggcgggactggctgtatttttcctgacgaaaaaagcgaaaatgaaagaaatcgctctgcctgccgcattttccgcttttctcggcgtaaccgaaccagtcattttcggtgtgaacctaagataccgtaagccgtttatcgcgggaatgatcggcggagcgctgggaggagcctatgtcgtggtgaccggtgtcgccgccaatgcctacggtctgaccggaattccgatgattgccatcacggctccgctcggtttaggaaatcttataaactatctgatcggaatgggcatcgcctctgtctcggcgtttattgccgcttacattatgggagctaaagaaaaggaggccgtcaaatgaggacaccggatcaagagctgcgcctgcaggctgaggaagcgaaaaagaagcggggagaaacagccgcgtcagatccataccgccagaactatcatattatgccgccggtcgggcttttaaatgatccgaacggcgtgatccaatggaacggcgtatatcacttgttttttcaatggcagccatttcatacggggcacggcgcgaaattttgggcgcatgtgacgacgaaggatttcgttgagtggaaagaggaagaaatcgcgcttgcgccgggtgagtggtatgacaaaaacggctgttattccggaagcgccatcgaaaaagacgggcggctctgcctgatgtacacaggcaatgtccgtgacggagaaggcaatcgggaaacgtatcaatgcctcgccgtatctgaagacgggatcgtatttgaaaaaaaaggagtcgtcgcgcgtctcccggaaggctataccgctcatttccgtgatccgaaggtttggaagaaaggcggaacgtattacatggtgctcggcgcgcagacagaaaagctcaccggaagcgctgtattgttcacatcagagaacttgacggattggacgtttctcggtgcgattgcgggggcggactccggcggtctcggatcattcggctatatgtgggaatgtcccgacctgttttcccttgacggaaccgacgtgctgctcgtatgtccgcaggggcttgaagccgacgggataaaatatcataacagccaccaggcgggctatttcctcggcaggctgcatacagagccgccagagtttaagcatggtgaatttacggagcttgacagaggatttgatttttatgcggcgcagacgctggaagatgataagggacggagaattctgttcgcgtggatgggcgttccggatcagcatgaggacaaacatccgacacatgcgtatcactggattcactgcttaacgatgccgagacagctgtcactgtccaacggcagaatcatacagcgcccgctcccggaaatgaaatcacgccgcacggatgaacaaaagcgccggcttcaattgaattgctcgtctgtaagcctcccggtgaaagatgcatcccgggctgaagtgctgctggaagacatcacttgcgaatccggttttgaaatctcaattcggggcgcagcccggtttatatttcatcaggaagaggggctggctgtgctggagcgcactgctttcagcggagaagaaaaagaaacgagaagctgcgccattagcgaggtgcattccgtgcagctctttctggatgcatcctcgattgaattgtttttgaatgatggagaagaggtattcagcgccagatattttcctttcccgggaaatgatgacgtaaccgtcacttcggtaggaaaaacggaaataaatggatcaatttggacacttttgtagaaaatcgttcttttttcttatgtgaaacctatgccatctgtgctattcttcaaacgaaagcctatgattccaggaataaaaggagttgttttctcagttttgaaaaatcagaagatgacgccgaaatgtttacttgtcaaagccgcagagcaagtggaagataagcgggaagaatataaagaagtattgcttcagctgaatcgcatgctcaagagagctgagccgcacaatgaatggagtgatcggctaatgcatacatatgaacagatgaaggaatatgcgctgtttgtgcagtctattgagatgtttttgcggtcatccgcgaaaaaaatgaaataatccccctcgatcatgagggggatatttattttattttccgctaaggcgcatcgccgaatgtttagtcggtccgatgtattggttcagcgggaaggattctttgattgccgcggttataaattcttttgccgcatagatggcttccttcacttcagcgcctttggccagttctgccgtcacggcggcggagaatgtgcatccggctccgtgtgtgtaaggtgtatcaatcatttcgctttctaatacttccgcggtttctccgtcatacagcacgtcgatcgctttttcatgtttcaatttgcctccgcctgtaatcaatacatatttcgcgccgagttcgtgaattttctttgccgcttctttcatgtcttccactgtttttaatacatccataccgctcagctggcttgcttcaaacaggtttggcgtgatgacggttgccagaggcgccaattgggtgcgaagcgcttcggcatgctccggatacagcacttcgttcgctcctttgcagaccatgacaggatcgataacgacattcttcagctgtttttctttaatcgttttcgccgcaagctctatgatctccacggtagggagcattcccgttttcatggcgtctacgccgattccgtcaacaatcgtcgccagctgtgcgcgaatcgtatcggcatcgatcggaaatacttgatgatcccagctgttctccgggtccatcgctacgatcacggtcaaagccgtcattccgtatacgtttttttcttgaaatgtttttaaatcggcctgaattcccgcgccgccgctggaatcagaaccggcaatagtaagtgctttgtgcattgacatatcaatggcctccatcagtgttttatatctcattatagttagattttctcccgatcacaatacggaaggcttggaggaatgatttgacagccgcgggggctgtgcgtacaatacctacataagaatactaggtaagggtgagaaaataaatgctcaacagggagcttgtaaagggaagcacggtcattctggtgctgacgctgctgaatgaacggcccatgtacgggtatgaacttgtgaaagaaatggagaaaagaagcgggaatgaactgcaaatgaaggaaggcacgctgtacccatcgcttcataagcttgaacgccaaagctatatttcttcttactgggaaaagcagaccaaagggccggaccgaaaatattaccggatcaccgatgaaggaaagaccattctagccgaacggacgaaggaatggaatctgttctctgctctgatggaccggatgctgaagcggggcgggcagaatggataaggacctttatgtgcaggaaatcagaaaagggctggaaggcaaggccggaagccgtgaattattaaaggaaatcgaaagtcatattcatcatgccatttgtgatcatctgaaaaaggcaaaaccgaaagcgaagcgatggcgcttattctgcgggaagtggggactccgtctgaaattatctctgcttttcaaaaagcttcggcggtgcccgcgcggacttttatgctcttttatctgttctgcaactgcggtctttttgtgatgggggcgatgattacgatgatgcacgcgtggcggattcatcccgctgttgacgcgctgtggaaagggatttccgtgtcagtatggctgattatgatcagttatgtgctgtattggttccaaatcggctatcaagctggcaaagagttcggggctggcggcaaaaagcttgctgagcggacggtatgggcttcaatggtgccgaatctatgttttatgtttgtctttttgttcaatctggttccggctgggctgtttccttcggcggtcacaccgagttttgcggcagtatgcgccgttgtgacggtatgttttccgttttgcggcaaaataggtttttacgcaggcaggcagaggcttgcctgatctttttcactatatacatagggaatctatataggggtgttaaaatgagattaggttcgtggatgtacggcgcgtgcgcccaaatagccgttaccgtatttaccgtctgcggcttggttcttgcattgcccgttgtgagtctttttattatggttctgaatgggatgcaagatgctatatttgttgttttcagtattttgcttcttctattgttttatgcgctgggatggatttgggccgtttcgtttgcgcgtgagtggaaggtgaaacttttcgagatgcagatcagttcgctcattccgctggcgggtatattatacttgtacattgacagcggggtgagtataccggaactgattcatgattgggatgaggatggatgtgcgcttgtcccgccggcttttgtctgtttgtgcacatgctatgcgatggtgttggtgcctgtttatcaatcaaaactttggaacgccatggaggcgggcaggtttaatgccaaggcggtatgcactgtttgggaagaccttctgatcattctcgttttgctggcgggtatgacctggatttgtttctgaatgggccgaaatcaaaaatcccccctgatctctccgccgctttatgttttaatagaacatgagaaaaagcagaaggagcgggtcatgaatatatcaattgttatagtcacgtataaccggattccggctttgtgtgagctgctggagtcgatttccatgcagaccataaagccttatgaagtgatcattgtaaatgatgccggggaatcggtcgaacaagcgaagcagctgtacagcgatctgccgattcagattattgatttagaacagaatgccggacatgtggaagcgcggaacgcaggtgtgaaaaaagcgtcgggtgattatatcatgctgtgcgatgatgatgatttcattacgccgggccatttggaaagaatggcggctgcacttgctgatgcggattttgtccattctgacgcggaaattgtgtcatttgaagaacggggcggcacgagatatccgatgtcacggaagccgttcgcctatacggcggattatgcggatatgcgggtattttccacgtacgttccgtcaggcagcatgtacaggcgttctctgcatgacacgttagggtattttgatccggatgtccataattattgggactgggacttttatttgcgcgccgcgaaacagcaccgcgtgaagcgtgttccttgcgcgagcgtcatatatgcgttttttgagggaggcggcaatcagtccgcggatctcggcggcaaacggaagcggtacttagaccggttaagcgaaaagcacgggcttggggagctcccgacgaaaaacttcgcggttcttcttgaagagccggacatgaagaggcgggaggcgccgactgacattgtgtgggacggaaagcccgtccattcaagactgcacagttcataagggggacggacagtttgaaacagcttttaaaagacagctggtggaatcagctgaaagatgaatttgacaaaccgtattatcaagagctgagagaaatgctgaaacaagaatacagcagccaaacgatttatcctgacagccatgatatttttaacgccttgcattatacgccctatgaggatgtaaaagcggtcattctcggacaggacccgtatcacgggccaggacaggcgcacgggcttagtttttccgttcagcccggggtcagacagccgccgtctttgaaaaatattttcatagagcttcaggacgatatcggctgctccgtaccgaaccacggatcgctcgtcagctgggcgaagcagggagtgcttttgttaaacacagtgcttacggttcgccgcggtcaggccaactcccacaaaggcaagggatgggagcggctcactgaccgcatcattgatgtggtgaatgaaagagagaagccgattgtctttatcctatgggggcgtcacgcgcagatgaaaaaagagcgcattgacacatcgaaacacattattattgaatcgactcatccgagcccgttttcggcaaggaacggttttttcgggagcagaccgttttcccgtacaaacgccgcccttgaaaaaatgggggagcagccgatcgattggtgcatccccgacctgccgcaataaacgtttttttgaggcgcttccgcccggcggaagcgtcttttttgacgttcagggcgatatgccgtcagaaaaaataacaaactcaattctgcgattcgctcagaaatttgataaaatgcaggaagaagacaaattactgctggaggatttactcatgaacatacatatctctgctttgattcagaagatggaagaagaactgaggcaggcgaaaacggcggcccgcaccgaggaggtcaaaatgcacgcggccgccatccgctctctgtgtgatgtcgtgctcggcactcagacgcacaccgatccggcgcctgtgcagaatccgattccgaaagcggcgccgaaaccttccgcgtctccttcgacagacccgctgctgcttgaaaaaatgatgggcagcgccgggctgaaccaatatcagaaaaaagcgaaagacgaacgtgaggaagacggaaacggggattccattttcgatttttaacaggagaggttgattgacttgaaactgatactcgggggtttgcaatggacggcatttatgattgcggctgcgattgtagttcctgtcgccatcgcacaatcatttcacttgaaccatgccgattctgccgcattgattcagagcacattttttgtgcttggcgtcgccgcggtcatccaatgtctccagggacatcgtctgccgattaatgaaagcccggcaggcttatggtggggcgtatacacgatttacggcggactgacgggcacggtgtttgtgacattcggcgagacgctgcgggcgctgcagggggcgctgttattaagcgctgtctttttctttttgttcagcctttttaaagtgattgaacggctggccgtgctgtttacgccggttgtgactggtgtgtatctgctgctgttggtcatgcagctgagtcagccgattgtgaaaggccttttgggcatcggctatttaaaaaacagcgtcgacggccttgtattcgggctcgccatggttgtgacggcggcgatgttcatcatgtcccgatcgaatgttacgttcttaagacagtatgcgattctcctttcgcttgccggcggatggatcttattcgccgtcttcggcgcagccaaaccgattcaaataccggaccgcgtgattcagctgccggctctttttccgtttggaaaacccgtgtttgacagcggcctgatcattacgtcactcttcattaccgttcttttgattgtcaacatgctcgcgagcatacgggttgtagaagcggcggtgaaaaaattcggcggcaccgttggaaagcggcgtgagcgtccggcagggtttgcggcttcgatcagccaccttttgagcgggctgtcaggaggcattgcgcctgtgccgatttcaggggcggccggttttattgagacgacgaagcttccttcgaaaaagccgtttcttttgggaagtgtatttgtcatgatcatcagtatgatcccgctatttatgaatgcgttcgcgagtctgccctcaccggtcggatttgcggtaaacttcgtcgttttctccacgatggcgggtcttgcctttacagagtttgactcttatgagaaagcggagcaaaaacgaatccgctccattatcggtctggcgctcctgacgggggtcggcgtaatgtttgtgccggagagcgcgttatcagggatgcacccgatcctgatttcgctcttaagcaacggtcttgtgctcgggacgctgctggcgatagcgattgaccgaatccagcttatcaaaaagaaaaaatccgacaatctcgtgtcatcgcacggcggacgttgaattttgccgatgttgggttatgattgaattggaaactttaacgaaaaggcgggagaaaaatagatgaaagtgtttattattcttggtgcgattaacgctttattggccgtggcgctgggcgctttcggcgcgcatgggcttgaagggaaaatccccgataaatatttgcaggtgtggcacacaggcgtgcaatatcatatgtatcacgcgctcggtcttctggctgtcgcgtttttggccgaaaagctttctggcgcaggcagtgtttctgttgcgggctggctgatgtttgcgggcatcgttctgttttcaggaagcctgtacgtattgagcgtgacgcagatttccattctcggcgcgattacaccgctcggcggcgtggcgtttatcatctcttggattatgattatcgtcgcggccgtcaaatatttataaagaaaaaaagccaatcctctgtcaagtgagcgattggctttttgatttatctcggcgaataagaagacatggagtacggataagtataagcgatttcctcatcaaacgtgatgtaatcaaggtaaatggtcagaagcagatagcgggtgcccgttttcggatcgctgatgatgatatggtcacgtcccgctgcctgaatcacaccgcggaaaatctttgaattccattctttgctgttttcaaatgtcatataaatcgtcgccgttttgccccggttcaaccgcagaatattttcaatgtatgactcttcaatcggcagcatgccgggaacgttttgtgacgatgatggacctgacgggatttgaaagctgccgccgccctgctgctgcggctgaccggggaaccccccgccgaagctctgctggccttgctgcatcggcattgtcatttgctgctgcatcggcatcatctgtgatccttggccctgtggctgcggataaggattaggcccgagctgcggctggtatccttgcatatccattcccatccccatcccttgcatttgctgatattgattctttttcggtttcatattgttcctcctttgatgaaaacctcttgatgctgaaacctcctgaaaagtatcagacagccgacagagaggctgctgtttttatctattccaccatatgagcccaaagaaagatttatgcggaaaaagaaaatacgctccaataagtccggacatcagagccggctttttttgtgcgcgcaatgctgacttttcacataatagtctgtattcctagcgcatcttccgcataaggaacatatgatagcggtagtttcaggtgcgaaaagggggtgacgagttgcctaaagtgtcagtgatcatgacgagctataacaaaagtgactatgtggcccgctctattaaaagtattctgtctcagacgtttacggactttgagctgttcattatggatgacaactcaaatgaagcgacattggcggaaatacgtccttttctcacggatgaccgcgtccggttttatcaaagcgatgtatcgggcgtcaaagaaagaacggaaaaaacacgctacgccgccttgattaatcaggcaatagaaatggcggagggcgagtacgtgacatatgcgaccgacgacaacacgtatgtgccggaacggcttgagaaaatggtgaaagagcttgatgaagacccggaaaaagccgtcgtgtattcaagttccaaaacctatcatctgaatcagcggaaagagacggtgaaggagacggccaggcccgccgaacggatcgtgtggaacgcgccgtgcgccattgaccattgttcggtcatgcaccggttttccgtgctggaacaggtcaaatcggcattcggttcctattgggatgaaagccccgcgttttaccggatcggtgacgcccgtttcttctggagagtgaatcatttttatccgttttacccgatttctgaggagcttgatatcaattatattaccgatcaatccatccattatcagcttttcgcggcggagaaaaacgagtttgtgaacagccttccgcggcagaccacgtgccgggagctgagggaatcattaaaaaagcttggaaaggggtgagggcttgtcggcatacttagcgaattattgggtgctgtaccggcagtatattgacctttttcagtcacttcgctacaaagacatcccgctcgcattgatcagtaatttttatcaatatatcagtccggcgcttcgggagagcatggagcagaacccagagcttttcggtccggctgatcagcatattcctgaagccggtatacagccatattatgatcaaaaaaggcaaaacattaagaaaacagatgagaaaccggtaaacggaaaagtcattctgcatttcgatcatcttcggttcaccgagggaaattaccggcagtttgatccggcaaaaacagcggtactggccagatggagtctgcctgaccattacgggctgcccgttatctgcaaattggagctgacgggaatggggcaaaaagggaaccccgtcccttatattgaaaaagcccattccattttgaaagagcttcacagccatcccgctttcggaaacagagaatttcaggaacgtttgtataaagacattccattatttattgaagcgattgatgccgttgatattttgtttacggccgagaagatttccgccgttgtagtcggcacgacggaggatatttacagccgtgtgctggcgctgatgtccgcgaaaaaaaacgccgtcagcatctgtctgcagcacggagcgctcatgggagatgaagcgtttctgcccgtatttacggactatcaggctgtattcggggcttatgaagcggagtggtataaagcaaaaggctgcagggatgaacaaatcatcatcacggggcatccccgtttcgacgagattttctcaagagaaccgatagatcaggatacgttttaccgcaaactttcttttctcccgtcacagcggacggtgctgatcgccacgcagccgttttctgatgaattttatacgggagtgcttgaagagcttgtcggccaaaagaacatgcagctcattattaaaccgcatccgtgggaaatcggcaaaaacaagctggatgcttacaatcaggtgctgcggaaatataaagcaggaaaaatcatcaaaaaagagatggagctgtatgacattctcccgtatgttgacgctgcggtgactcagacatcaacggtcggtcttgaagcgatgctgtttcaaaagcccgtgctaatcggaaaatcagcgggaacccacagatacccttattatcactcacttggagcatttgtctttgaggacccgcaggcactcgctcaggaattaatccggatatgcgaaagccccgcagaatatcaaaaagcggaacaggcgcgccgtgcttttgtcgccgcgaactacccggttcaggattcgcttgccgctttatgccaagtgcttcaggaaaaaaccggagtcagcttcagacgggttgacccttcataaaaaagataggagcgcaaagaaaatggtgcaaaaaagatcagcttttcttccctattcattgcccatgatcgggaaggacgaaattcaggaggttattgatacgcttgaatcgggctggctttcaaagggaccgaaagtagaggcgtttgaaaaagcctttgctgcctggacgggagcaaagcacgcgatcgcgctgaactcatgtaccgccgctttgtttttggccctgaaagcgaaagggatcggtcccggcgacgaggtcatcacgtctgccgtgacgttcagttcaacagccaatacaatcgtgcacacaggcgccgttccggtgtttgttgacatcgatccgcttacgctgaatgcggaccctgaaaaaattgaggcggccgtcaccccgcggacaaaagcgattgtacccgttcatttcgccggccagtcgtgtgatatggatcggattctggccatcgccgaaaagtatcagctgtttgtcttagaggatgccgcacatgccgtgtataccacttataaacagaaaatgatcggatcaatcggtgatgcgacggcattcagcttctacgcgacaaaaaacctggcaaccggtgaaggcggcatgctgacgacggacgatgacgggcttgccgatcagatcagggtgctcagtcttcacggcatgagcaaaggcgcttggaaccgctattcttcaaacggaagctggtactacgaggtcgaaacgcccggctataaaatgaatatgtttgatcttcaggcagcgcttgggcttcatcagctgaaacggattgacagcatgcagcaaagaagagccgacattgcgagccgctaccaggacgccttcagacacatgaaagggctgaccatcccgcatgtcagtgatgacgggcggcatgcatggcatctgtatgttcttcaaatagaggagcaggaggccgggatcagccggaacgatctgatttccgctttaaaagaccaatataatatcggcacaagtgttcattttattccggttccgttccatccgtattatcaaaaaacgtacggatataaggaaactgactttccggccgcggcagcgtattatcaccgcaccgtgtcactccctctttatccgtcaatgacagatgacgacgttgaatacgtcattgcagccgttaccgatatcgtcaaaggggctgattaggtgtacagactgagggaaaatcttgcgcaggacatgattcatgccttcctgcatcagaagggcatccagccggaagcctatgaatcgtcgctctgtttattggaagaaaacagccttcaaggcgtgattttatatgaaaactcttcgtgggaaagtcaattgttccgaaaaaatatcatcaatgtgaagcttgcagccgcaaacagtaccggacagctcaaaaggctgtttcaggaattttacgcggcaaggcgggcggccggcactgattttatatttattaaaataccggctgaagatatcggggcgatgcaggtcgttcagcagcttccgaacgcttattttgtagggagtctgctcaaactcgtcagcccggtgcgtgtatataacagcacgccgccatttgagattacagaagccggacccggcgacacggaagcgatcagccggctggcccgcgacgcctttacaaaaagcaggtattaccaagacccccatctcagctatgaaagtgcaaaccgcctgtttgaagagtgggcgcggaataacgcggaaggcagagcttcgttacaattcgccgccacatataagggagagaccgtgggctttgttcaggggctgtctaaaggcgatgaattcgtccttgatctgatggcggtaaagccgggatttgaaggaaaaggagcgggattccatttagcggcgcacgtgattgaacaatcattgcgctttcagcataagactgtatcagcgggaacgcagctccacaatgtaagagccatccgcctgtatgaaagaatgggatttaaagcggatgcgtcctattactactatcatgtgtggcccgggaaggaggcggactgatggcatcatgcaaaatcggaacgaagtcaatcggcgaaggttcgcccgtattcatcatcgccgaagccggaattaatcatgacggaaaactgagccaggcgtttgaattgatagatgcggccagtgaggccggcgcggacgcggtcaagttccaaatgtttcaggctgacaaaatgtatcagaaagaccccggcttgtacaaaaccgctgcgggaaaagatgtctcgatattttctttggtgcaatcaatggaaatgcccgctgagtggatcgaaccgctgcttgaatattgtaagaaaaaaggcgtgctgtttttaagcacggtctgtgacgaaggctctgccgacttactgtatgcgacttcgccttcagcctttaaaatcgcctcctacgagctgaatcatctgccgttattgaaatatgtcgcaggactgaagacaccgattatcttttccaccgcgggcgctgatatttcagatattcaggaggcttatcaaaccattaccggcgaggggaacacagaaattgcgatcatgcattgtgtggcgaaatatcctgcgccgcctgaatacagcaatctgagcgtcattcccatgcttgccgccgcattcccggatgcagtgatcggtttctccgatcacagcgcccatccgtatgatgtgccgtgcgcggcggtcaggctcggagcgaaactgattgaaaagcattttacgatcgataaaaacctgcccggtgctgatcactctttcgccctcaatccggatgaattaaaagaaatggttgcggcgatccgctcggttgaagcggagttgcggcaagggcaccacgctccggtgccggaagtgttgtcgggaagctcccataaaaccacgacaccgattgaaggggatatcagaaggttcgcttacagaggcattttttcaacagcgccgattcaaaaaggcgaatgttttacggctgaaaaccttgccgtccttcgtcccggtcaaaaaccgcaggggctccacccgagatattttgagcttttaactgacggcgcgcgtgcggtcagggatatccccgccgacacgggcatcacttgggatgaccttttgacgaaaggcagcccatatgatgactgacattttgtttatcattcaggcgcggatgggaagcgggcgtcttcccggcaaagtgctgaaaccgatcggcgggtatacgatcctcgatatgattgtcaaaagggttcggcaaagcgcgtattatgatcaatcgcgggataatctgatcgtcgcctcgtctgacagcaagaccgacgacattctgtctgcgcactgcctcagcaagaactaccgtgtgcaccgcggcagcgagcagcgcgtgcttgaccggtttgcacaagtcatcgaacaagtaaaaccggatatcgcagtcagactgacgggggataacccgtttgtcgactcttcgctgcttgattttctgattcaatcgcatttagaccagcacgcagactacacgtatatttgcggtacaccgctcggcatcggcggcgaggcggtaaacgcgcgccttttaacggagatcaatgccgacaaaacgctggcggacaaatatcaggagcatatcacgcttttaataagagaatctcctgagaagtaccggcttctctttcctgagcccccgcaggaactccgggctccccacttgcggatgaccgtcgataccgaagaggactacaggatggcccgcgagctgtacgtaaaagcgggctcgcgtcctgatattccggcaaaagaattgatccatctgctgaatcgtgatccggagctcagggccattaatcaaatgatccggcaaaaagaggctgattagcatgcgggttttgattttcgcggacgggggccgtgacatcggcatggggcacgcggtgcggatgaagctgcttgccggtgccattaagaataattgctcaataacgttctacacaaataaagaggcttcttcttatctgtcttctgatcaatgggaagtgatcatcaagcctgacaagggacagaaggaatttattgtccgggaaataaacaggcaggctcctgaccttctcatattcgatctgctcgatataccgtgtgactggttagaggaaatcaaaaagcattcatcggcacgcatcgtcttatttgaagaaaaacgggaacatgtcattcatatatgcgatgccgttataaacggcatttacggagggctgaaaagccggacggttcaaatgggcagcgccgcggtatatgaaggcccggattatatcattcttcatccgggttttgaaaaagccaaacagctttatcagctgaataaagaatgccgtaccatattggtctcattaggaggaagcgacccgaagaagcttgtctttaaagtgatggaagcatgccgccgcatccccgccattcagcgaaaacgagtgatcatcgtcatgggcggcgctgcgcctcatgctgatgacgtgcgcgcgcatcttatacaaatgccgtatgccgagatggtaaggcagacaaatgacatggccgcgcttctttcgagggctgatatggccgtcgtgtccggcgggatcactttatatgaaaccatttgtacaggtgtgccctgcatcgtactttctcaagtggagcatcaaactgagacggcgggaaaattcgccgcacggggggccgccgttcacctcggccttggtgaatgcatatcagcggacgttctcgcacggcatatgtctgacatggccgctgattatcctctgcggaccggacttcatcaaaacggaaagccgctggttgacggcaggggcatcaaacgggcggcggcgattctttatgatttgtgataaaaccacacgtaaggaagtgttcatgtgaaaggtgttatcttagccggaggcaccggctcacgccttatgccgctgacaaaagcggtcaataagcatttactccctgtcggtccatatccgatgatttactggtcgatcatgaagctggaagaagcggggattacagatatcttgctgattacgcaaaaagaatatattccgcaatttcataaacttctcgaaaccggagaagagctcggcgtctcaatcacatatcaggttcagccagccgcatccggcatttccgacggtttatcatacgcaaagcggtttaccgggcgcgatccgttcgttctgcttttgggagataatatttttgaagattcattaaaaccttatacggagcgtttcgcaaagcagggaaaaggagcaaaagtgctgctgaaagaagtggacgatccggagcgcttcggcatcgccgagattgatgaggaaaacaaacggatcaagtcgatcattgaaaagccggagcagccgccgaccagactatgcgtcacagggatctacatgtacgacgcagaagtgttttcttatattgaacaaatttccccttcaaaacgcggcgaactggaaattacggatgtcaataatttatacattgaacacagtgagctgacgtatgatgtgttaacgggctggtgggtggatgcgggcacgcatgaatcgctctacctcgccggaagcctggcgcatcaggtattacagaaaggacaggagcattaatcatgccaaaatcatatttaattacagggggcgctggatttatcggccttaccttcacaaagatgatgctgaaagaaacagatgcgcagattaccgtcctggataatctcacgtatgcaagcaggccgcttgaaatagaagccttaaaaaagaacgaccgttttcgttttatcaaaggtgacatttctaaaaaagaggacattgacaaagtcttttcccaaatgtatgacgctgtcattcattttgcggctgaatcccatgtggacagaagcataaatcaggcagagccgttcatcacaacaaatgtaatgggcacataccgactggcggacgcggtgttacagggaaaagccggcaggctgattcacatttccacagatgaggtgtacggagatttggcgccggatgatcccgcttttacagagacgacgccgctttctccgaacaatccgtattcggccagcaaggcaagctcagacctgctcgtcatgtcttatgtgagaacccataagcttcctgccattattacaagatgcagcaacaattacgggccgtaccagcatcatgagaaaatgattccgaccattatcaggcatgccgtaaacggcacgccggttccgctgtacggcgacggattgcagatcagagactggctgtttgccgaagaccattgccgcgccattaagctcgtcctggaaaaaggaacactcggtgacatttacaatatcggcggaggaaatgaacggacgaataaagagcttgcgtcatttatcatgaaggagctcggtgtcgaggaacggtttgctcatgtcgaagacagaaaagggcatgaccgccgttacgccatcaatgcttcaaagctgaaaaatgagctgggatggcggcaggacgtcacatttgaagaaggaatgagaagaaccattcgctggtatacagacagccaagactaatcggaaagaaggggatccgattgacgaaggtattagtaaccggagcggccggccagctggggcgggagttatgccgccagctgaagcgggaagggtatgaagtgatcgccttgacaaaagcgatgatgaacatatccgaccagcgttcggtgcggcactcgttcagccattacaagccggatatcgtcgtcaatacggcggcatacacctccgttgacaaatgtgaaacggaactcgacaaagcgtatttaataaacggaatcggcgcttattatgccgcgcttgaggctgaaaacaccggcgcgaaattcattcacatcagcaccgattacgtcttcagcggcaaaggaacacggccataccagaccgatgatcccgcagatccgggcacgatttacggaaaaagcaaaaaactcggcgaagaactgatccggttgacgggaaaaaaacacaccattatcagaacatcgtgggtgtacggcagcggcgggcacaactttgtcaatacgatgctgaagcttgcggatacacatgatcaggttcgtgtcgttaacgatcaagtcggagcgccgacgtatacaaaagatttagccgaaacggtgatcggtctgtttgacaggccgccgggcttataccacgccgcaaacagcggagtgtgcagctggtatgaattcgccaaggctatttttgaagaaagcggcagaaccgccgccgtgctgcccgtcacgacggaggaatacggaaatgagacgccgcgccccgcttattcggtgttgagtcttgagtcgattgaacggcaggggctcggcatgaggcattggcgggaagcgctgcgggattatttacaaggggagggacagtgcaagtgatcgaaggcgtaaaaatcaaaaagctgatcaaacacagcgatgaccggggttttttctcagaactcgtccgtgacgatgaacatctcttagagcgtttcgggcaggcttcctggtccaaaagctatcccggcgtcattaaagcgtttcactatcatgagaaacaggatgacctgtggtttttcccgacaggccatgcccaggtcgtgctccatgaccttcgcgaagagtcggcaaccaagggagaaacggatgtctactacatgggagaagacaatccgatgctccttctcattcccaaaggcgtcgcacacgggtacagagtgctgggtgaaaccccgctgaccattatttatttcacgacgatgtcctacaatccggatcagcctgacgaaaaaagaatcccgtggaatgatgacaccatcggatttgattggcagacggctcaccggtagcgcacaagacgaagacagcggatgtcttcgtttttttgtgttttgttgactttgatatgagtggagccagtgaataagatacgaccgcccactatatcatgattgctggcctgaaggacaatttcatcaaaaatgtcttggaagatggcggtcagttagggacctgaaatttaagagatcctccctttcttctcctatggacatcatgcatcctaaaaaacaaaaaatgatttatagaatggggataggatttaattagaaaaatcttaagaaaaaagtaatatttgcttaagagaaaagagaactttcctttatatagtaggagtatatatggaaaggggaaagcgaatgacatacatcttaaaaacgagtcagcttacaaaaacatttaaaggaaaagaagttgtttccggggttaatatgcacgtgaaaaaaggggagatttatggattcttgggtcccaatggtgcaggtaaaacaaccattatgaaaatgattaccaatttaatcaagccaacaagtggtgaaatagaaattttcggtgagaaattaacagatacgtcatttgaagttttaaaaagaatgggcaccattattgaatatcccattttctatgacaacctcacggctaaagaaaatttagatttccattgtgaatatatgggctattacgataaaaaatccattgaccatgctatcgagcttgtaaagttacataatattgataataaaaaagtgaaagagttttctttaggaatgaaacaaaggttaggaatagccagagctatttctacaagaccagaacttctcattttagacgagccgattaatggcctggatccaataggtataaaagagttgagggatctctttaagttactttgcagagaatatggaattacattattagtctccagtcacattttagccgaaatggaacaaatgtcagatactgttggtatcatacagaatggcaagttaataaaagaagtttctatgaagagtattaacggaaaacaaacagagtatatagaggtaaaagtccaaaatataaaaaaagcgttatatattttagagcaaaatctggggataagaaattttaaaatgattgatcaacaattaattcgtatctatgaaacagcagttacacaacaagaaatctctaaagcacttattctgaatgacattggtatagaaagtataaataaaaaacacagttctttagaagaatacttcttaaattctatgaatggggagggaatacacactagatagattgcccgtctgtgttatgcacctatttgcattgtcttaaattcttcagctggaggctattagcatgttaaaacttatgaaattagagtacaaaaaacatcacttatcacagtattttaaatgggtggcactttggatattcatcatctttgccttagcggcttttatgggatgggaatctaaaaatgaaaatgaacttatgtttcgtgattatgcagattttatatctctaactaatattttaattagaattgtgtttattagtttttctgctgtgattttatcccgtttagttattgatgaatataaaaataaaacaatacaattgctgtttacttatcctttacaaagaaaaaaattaatgcaagctaaactatctattgtcttcctattctgctttgtaagtattgttattgctacgtttgttattaacttgttaattctcttcgtgagtccgcacttatatttattcgagaagcctgttgaaatgagtgaagttatttccgctatgccatcgactcttctcaccgcttttatgatgggaggagtgagtctgattcctttatttttcggcatgagaaaaaaatcaacttctgctacaatcacttgggctgtcataatcggggtttttatcaatgcaacagtttccgacggaggagaaacagtcagtttaagtcaatttattatcattccaattatactttgtttatttggttttttagtgggttatctttcttaccgtaaggtggatcagaaagatttattgtagataaaaggagaaattatacaatgaagaagattatagcatcatgtgcagtgttaatcgtaatcggcggaattgttttaagcctttataagacagatacaaaaaactttaaaaagaacgtgtcctgcaatgttgaaaaaattgatactttaaaagtatatactgactcatgggatgtgaagtttaaaaagagtaattcaaataaggcaacaatatctgctgaggggaagcagaaagataaggctccagttacatttcaaggagatgggggggatttggtcgttagtcaaaaagaacaaaagaatggcggctttttggatggatttacttttgggaagcagggcggcacaatctatattaatgttcccgattcaggtatgaacaatattgaaataactaataaggatgggaatatacaattaagtgagatttcagctgaaaatattatcgttgaaaataattccggtgatgaaaaaatcaataatgtttcggctcatactggaaagttttcatccaaggatggggcgttaagcgttgaaaatagttcttttgagaaattaaatataacatctgcaggcggcgataacgagatgaaggaaatacatagttccaatgtaaaggttacttctaaagatggagcggtttcaatcaaggacataacagaaggaaaatctttatcagtaaatacgaaatcaggagatataggtgtatcttataaaaaagcgccaacttcacttgctgtttttgctcagagtaattctgatgtaacgtttgatttagatgggcttaataagagccatgatggcgtaaaactgaaaaaaggtgaaattggcgcgggaagtaataaagtaagtctatctagtgaagatggttcgataaaggtgagataaaaagagaaaaacacaagacaacaattcccgctattgaagaatggttgtcttatttgtttgtatttaaaatgttttggaatatttatctccttttgtataaaaaataattataatgagattaattatctgtataatgattgaaataaacagtgaattaagaatatcagttttatatttaaggagcggaaagcttgggttacaaaatattaattgtagaagacgaccaattcataagcgatatggtaagcgaaagcttaacgaaagaagggtttgaagtaacagcagcttttgatggtgaagaagctttagacatattgaacacccaaaagtttgaggttataatgttggatttaatgcttccgaagatagatgggatggaatgtttaagaatgattcgttccaaaagtatggttcccgttcttatcatgtctgcaaaagatgaagatgtagataaggcacttggtctcggcctcggagctgatgattatatttctaaacctttttctatgctggaggtaatagccagaattaaagcaaccattagaagagaaagacactataagagctccctgtcttcaaaggaagaaaaaatcattaaaataggtgatttaagtgttgacctgcatggcttttctgttaaaaaattcaatgaaaagattaatctcacggcaaaagaatttaatattttaaaactctttatttctaatccttcacaagtatatactaagtctcaactttataagtccgtatgggaagatgagtatcatggagatgagaatgtaattaatgttcatattagacggctcagagagaaaattgaggacgatccatctcatccaacgtacataaaaactttgtggggaatcggttataagttgggagatttttgaatgttttatctagtggttattttatttatatgctctgcagcagtaaatatatttcttttccgaagccgattaaatctaaggactgagattaaatatataagaaataaacttcgaaaagttgtaaatgaagagacaggcgaaagattattgcttaacacggaagataaatatataaaatccttgttaattcaaataaaccgtcttttagaccataatcaaaagatcaaagggaactgcaatagtattgaactgtccatgcgaaaaatgctatcaaatatttcacacgatttaaagacgcctttaacagttatactaggttatattgaaatgataaataacgataaaagtctgacttcggaaaaggttatgagtttactaaaaacagttaatttaaaaacggtcgaggtattagcgttaataaaccgtttttttgaacttgtaaaattagagtcaggagataaaaaattaaattcttcacgaattgacatatgtgaagtcagccgaaaaataattttggattactacgaaattttaatcagcaaagaatttgaagtagtgattgatatacccgatgattctatctttgttagcggagatgaagaagcaattgagagggttctgaataatttaattacgaatgcaattcaatatggttccgatggtaagatggtgggtttaaagatcagaataactgataatgatgtttttgtagaaatatcagataaaggaaaaggaataaatgaaatgcataaagaccgtgtctttgaacgaatgtacacattggaggactcgagaaataccaattatcagggaagcggattggggctgacgattactaagagattagtagagcaaatggaaggaagtatatctctaaatagtgtccccttcaaagaaacaacgttttctgtacgtttaagacgtattaaattttaataaaagcagtaaggtttcttctgtatacgtcttcaaatcccctttctctttaatctgagaggctgacaacagtctcttttttttttatacgcaaaaggatggcatgaatcttgcatataaaaaggggcgtaacgacaatgtgaaagggattgatgggttttggtgtaaaagcgcttacattttgttctgccggtaattgaagcttacacgtaaaatacgatgaggtgataaaacatgtcagccaacccgctttctaaaagcaatcagaaagatgaagaaaaagaagttcttaatttgttcttgtcaacacaatcgatcataaaagaagctctgcgcaaactgggctatcctgacaatatgtatgaactgatgaaagagccgatgcggcttttaaccgtccgcatccctgtcaaaatggacaatggctcagtacaggttttcacgggctaccgctcacagcataatgacgcagtcggcccgacaaaagggggcgtgcggtttcatccggaagtcagtgaagaagaggtcaaggcgctttccatctggatgactttaaaatgcggtatcacaaatcttccttacgggggcggaaaaggcggcatcatctgtgatccgcggacgatgtcattcggagagctggaacggctgagccgcggatatgtgcgcgcgatcagccagatcgtcggtccgacaaaggatattccggctcctgacgtatataccaactcgcagattatggcatggatgatggacgaatacagccgcctgagagaatttgattcaccgggattcattacgggcaaaccgatcgttctcggcggttcacaggggcgggagacggcgaccgcgcaaggcgtcacgatttgtattgaggaagccgttaagaaaaaagggattccattggaaaatgcacggatcatcattcaggggttcggaaatgcggggagctttctcgctaaatttatgcatgacgccggcgccaaggtgatcggcatctcagacgcccacggcgctttgtatgaccctgacggccttgacattgattacctgctggataagcgggacagcttcggcacggtgacgaatctcttctcggatgtcataacgaaccgggagctgctggaaaaggactgtgatattctcgtgcccgccgcaatctccaatcagattacggctgaaaacgcccatcacattaaagcctcaatcattgtggaggcggcaaacggcccgacaacgatagatgccacgaaaattctgaatgaaagaggcgtgcttctcgtaccggatattttggcaagcgccggcggcgtgacggtgtcttattttgaatgggtgcaaaataatcaaggcttttactggtctgaggaggaagtcgccggaaaactgcgcagcgtcatggtgaattcgtttgaatccatttatcagacagcgcatacccacaaagtcgatatgcgtttggccgcctatatgacgggcatcagaaagtcggctgaagcggcccggttccgcggctgggtataagtgttatccgcaaagagattttgcatcagttatatagcagatcgcaaaatttctttgcattttcagattgcagctgacagattcggacaagcttcgtccgctttcggcaaagattttcttatttttatcacaaattgctatgctggtatgcttcttgcatcttcataaagcgtgagcacacattacaaaatacggggaggaattctaatgacagtttcatacgcacacgaaccatttacaaattttcaggaagagacaaataaacaatcgtttcaggaagcgctggcttatgtgaattcacagctcggcaagcattatccgcttatcatcaacggtgaagcgattgaaacggataaaaagatcgtttccgtcaatccggcagataaaaaagaagtgatcggttctgtatcagccgccggaaaagaacttgcggaaaaggccatgcaggctgcgctgcaggcatttcaaacatggaaaaaagtacggccggaacaccgcgcgaatgtgctgtttaaagcggcggcgatcatccgcagaagaaagcacgaattctccgcgtatctagtgaaagaagcgggaaaaccgtggaaggaagcggatgctgatacggcggaagcgatcgactttttagagtattatgcccgtcagatgctgaaactgaaagacggttcccctgtaaagagccgtgacggagaatataatcagtatcactatgagccgcttggggtgggaatcgtcatttctccattcaacttcccgcttgcgatcatggcgggaacggcggcggcagccatcgtaacaggcaacacgatactgctgaaaccggcggatgcggcgcctgtcgtggcggcgaaattcgttgaagtgatgaaagaagcgggcctgccggacggtgtgctccaattcataccgggcgacggaggagaaatcggcgactatctggttgagcatccgaagacgagatttgtgtcgtttacaggctcccgcgcagtcggatgccgcatctatgaacgcgccgccaaagtacagccgggccaaaagtggctgaaacgggtcattgccgaaatgggagggaaagatacggtgcttgtagacagagatgctgatcttgatcttgccgcttcctcaatcgtgtattccgccttcggattctcaggccaaaaatgttcagccggttcccgtgcggtcattcatcaggacgtctatgatgaagttgttgaaaaagccgtcgctttaacaaaatcactcaccgtcggaagtccggaagattttgatacatacatggggccagtcatccacgaagcatcttataataaagtcatgagttatatcgaaatcggcaaaacagaaggaaaactcctgacgggaggcgaaggtgatgattcaaaaggatactttattcagccgaccatttttgcggatgttgatgaaaacgcccgcctgatgcaggaggaaattttcgggccggtcgtcgcgatctcaaaagcccgtgatttcgaccatatgcttgagattgccaataataccgattacggactgacgggcgctctgttatcgaaaacccgcgcgcacattgaacgcgcccgcgaagattttcacgtcgggaatctatacttcaaccgcggatgtacgggagcgattgtcggataccagccgttcggcggtttcaatatgtcaggaaccgattcaaaagccggaggacctgactatctgattcttcatatgcaggcaaaaacaacgtctgaagcctattaatctttcggaaatagcgcgatgaaaaagagagtcgcgctattttctctatatgagggtaaggaggatggaacatgtatcagcagctcagcaaaatgcttccggaggagaaaatagaagccattacgaaatcactggtggcgttaaacagcatcaacggcacattgggagaaggaaaaaaagccgactatatcaaagatatgatcaagagctttccctactttcaggagaatccgtcacatgtgtgggagcaggcgattcctgaggacccttacggccgcaaaaatattttcgcatttattgagggaaacggcgaaagcctgaatacggtcatttatcacgctcatcttgatacggtcggcatcgaggatttcggccctttaaaagatatcgcttttgattccgaccgtctcgcggagtatttctcaaactatgaatttgatcgggatgtgcagcgggacgcccgctcaggcgagtggatgttcggaaggggttcggttgatatgcagagcggtattgccgttcatctcgccaatctgcttcacttttctgaacggcgcgatcagctgccgggccatattctgttcatggcaaacccggatgaagaaagccagcattccggcattttaaccagcatttctgaattaaaacgtctgaaacaagaaaagcagcttcgttatttagcagcgattaataacgattttatcacgccgctgtatgagggtgacacgacaaggtacatctacacgggcgcggcagggaagcttttgccttgctttgcgatttacgggcgggaggtgcatgtcggtgatacgctgtccggcatcgacccgaatttgatcgcatcagaaatcaccagaagaattcacaacaatattcatatggcggaaaacattgaaggggagcttgtgcttccgccgacctgcctgtaccagcgtgacaataaggaagcgtataacgtgcagaccgccgtcagcagctatgtctattttaattattttatttacgagaaaaccgccaaagaagtcatggatcagctgactgccgtggctgacgaagcttgcagagagacagagcgaaaattatctgattattatgacgaatactgcgagagaacgagcctgccgaaaaaagagatgtcatggaacgttcaagtgtacagtctggaagattacctgaaaaggctgagaaaccgcgggatagaccctgcacagtgtatcgagcagacatttaaaacatatgaacatcttgaactgcggatgagatgctttaaagccgtcgaggaactgcaaaaactcgatcctgagcagggagccaaggtcattattttctatgcgccgccttaccttccgcacaattatctgaaagaagagagcacacgggaccggcttttgcagcatgtcattcaagaagcggtcgataaaacagcggcatcaaccggagaaacattcgtctttaaaaagtttttcccttatttagcggacggaagctttttatcgctgcatgaaacagacgaggaggtctccgcctttaccgataattttccgggctgggatgtcatcgggacgattccttttaaagaaataagggaattgaatattccgtcggtcaatataggggtatacggaaaggacggccataaatggacggaacgcgtgtacaagccgtacacattccatgtgctgccggaactcattcagcagacgacaatgcaccttttgcacagctgccgattagacatacgcacaaatggctgacataacggaataagggggatgtatatgcagggagataccaatcaaactgaattgcagcgcacgatgaagggccggcatttgtttatgatcgccctcggcggcgtgatcgggacggggctttttctgggctccggttttacgatcagtgaagcaggaccgatcggcgcgatattggcttatgtgatcggcggagttttaatgtatctggtgatgctttgtttgggggagctcgcggtcgccatgccggtcgcaggatcatttcaggcgtatgccgcaaagtttctcgggccgtcgacggggtttacgatcggatggatgtacgcattcagctgggccaatacagtggggcttgaactgacgtcggcggggattttaatgcagcggtggtttccggccgttccgatttgggtgtggtgccttgtattcggcgtcgtcattttttccattaacgcgctgtctgcgcggagttttgcggaaatggaattttggttttccagcattaaggtcatggccattgtattgtttattattctcggctgcgctgcggtattcggctttgtcggttttaacggcgggcagacggctccgtatctgtcaaactttacgacggacaaagggcttttcccgaacggcgcccaagccgtgctgtttacccttgtcatggtgaatttttcattccagggcaccgagctggtcggaatcgcctcgggagaaagcgaaaatccggaaaagacgcttccccgctcaatccgaaacgtcatatggcggacgctgtttttcttcgtgctggcgatgtttgttctcgtgtccattttgccgtaccaaaccgcaggcgtcatcgaaagcccgtttgtggctgtgctggataaaatcggcgttccctatgcggctgatatcatgaactttgtcattctgaccgccatgctgtcggtggcgaattccgggctgtacgcttcgtccagaatgatgtggtccctatcaaaaactaagatgggccccgcttccttaacgaaactgacgaaaaaaggcgtgcctctgaaagctctttccatcaccatcgccatctccggtttatccctgctgacaagtgtattcgcggctgaaacggtgtatgtgtggctcatttccatctccggtatgattaccgtcgtcgcgtggatgtcaatctgcgcttcacaattcgttttccggaggcgctttctcgctgaaggaggaaatctgaaagacctggcatttaaaacgcctctttatccgatcgtgccgattctcggattttcggtttacggtcttatcttgatcagtctcatctttatccccgaccagcgtatcggtctgtactgcggcgtcccgctgatgatcatttgttacgcgtattatcacttcggtatcaaaaaacgcctgaagcgtgagccggcttcttcgaaaaaaggcgctgccggataagaaaaaaagcccttcgcttaaagcggcgggctttactttgtttttcgttttgccgacagcacataggatagaacggcacagaactcaaaaccgaaaatgctgacggccatcggccaggcattttcttctccggcaataccgacaaggggagcggcagccgcaccgccgataaagggcaggagtccgagaagagccgcagcgcttcccgcgcctttctcctgtttttgcatagctaaagaaaatcccgtcgtcgtgacgatcccgacagaagaaacaatgatgaataaagaaatgcagaccgccgtcaggcctaaaccaaacgcaagtgataaaagcaaagtgatgcttccgatgacggcgatcaacagcccggagacaaacagcttccgttcatcatgtgttttagccatccgtccggtgatttgggtggcgcatatgattcccgcaccgtttacggcgaacagcaggctgaacatttgcgctgatacgccgtagatgttttgcagtacaaacggcgacccggcaatatatgcgaacatgccggtcatcacaaatgcctggctgagcgcaaatcccataaacatccggtcgccaagcaggccgcgaaatgtcatcagcgtctcccggagtccgccgcttgtccgcttttccggcgggagtgattcaggcaacgccgtaagcacggcggcggaaatgatacagccgatcaccgccagcacgacaaatacgattttccagccggcaaactgaaggataaatccccctgtaatcggcgctaaaatcggcgccgccccattgacgagcatcagtaatgagaaaaaagccgttaattcttttccggaatacatatcgcgcgcggaagcccgtgcgatgacgattccggccgccccggtgaatccttgaataaacctcatgacaattaaaaacgaaacagaagggctgaaggcgcataataaagaagacagcgtataaagcagcaatgacagaatgagcggcttccggcgcccgatcatatcactgagcggcccgacaacgatctgcccgaccgccagccccaaaagacaaaacgtcaggctcagctgcgcaagtgacgctgtcgtatgaagatcggccgccacttcaggcaaagcgggcagatacatatcgagcgaaagcggcccgaatgaagcgagcgtcccgagaatcagtaccatgccgaggcctgcgcgggcggcctttgaatcagcgttattcattccatgacccccaccttaacaaatgattctatcactatagcataaccggacggtgtattttatatcatttattgaatacaaactaaatattttatttaaaatctgaatgtaaataaaaaattagaattagttttcatgtgaaatgtaaaatgaaatataaggatgctaaactataaagaaacaaaaggtagaaaagttttacggaagaggtgttcaaagagcatgaacagcaaacaaaccgatcacatcgaaacgaaacgccgatttccgatctgtctcgcgcttgctttgacattaggcgtatttgccgccggttctgaagagctggtgatttctccgctgcttccggatttagcgcgggctttcagctcggatgtcagtgtgctggcgctttccatcagtatttacggagtgatgatttttatcggggcgccgcttctcgttccgctgggagataaatattcccgggagctcagcctgatgacggggctgcttatatttacggccggcacggtgatctgcgcgctggcgcacaatctctttttcttctttctgggcagggcgctttccgggcttgcggcgggtgcgtttgtgccgacagcttatgcggtggtcggcgaccgtgtgccttatgcgtaccgcggcaaggtgatgggtctgatcgtgtcaagctggtcgctcgctttgattttcggcgttccgatcggctcttttatcggcggcgttttgaattggcggtggacgttttggattttcgccctcatgtctgtcctcgttgcttcgctcattttcattgaggcgcgccgcagcacggcggatggggataaaacagaagaggaaaacggacggcaggcaggcactttccgggatgcgctgaaggtgccccgtgtccctgtatacctcacgatcactttttgcaacatgatcggtttttacggcatgtattcctttctcggcacctatcttcaccgcgtgctgccgggggggaatacagcttcagggctgctgatcatggtgtacggaatcggtttttccatgagcgtgttcaccggaaaaatcgcagataaggcggggaaaatgcgcgctttgatcgcggcattggccgtgatcagcatatggctttcttgtctcgcctatgcgccgtcatcaatgccgtttttggtcatcgggttattcgtctggggattgatgcaaagcctgacggtgaccttgctcagcaccattttaagtgattgctcacagagccgccggggcaaaatcatggcattttacagcctggcgtctaatttggccgtcaccttgggttctgctgtcatgggtccggtctatgtcggatacggatatgcagctgtcggatttatctgtgcggccgtcaccctcatcggctttgtcctcagtgttttcgcatacagaaggtatgggaaatatgagcatcaggccgaccaatcattgtatcggtaaaataaagtttctataattttataaatgttaatttttaacaccttatatcttaaggtgttttctaatatataggaataattatcaatattttcaaataatattgacagcttgaacatctatggataatatttacttaaaatttaacagattggttggtgctcatgattatattggataatagcattcaaacaaaaagcaaggcttattcaatatctaaactgattacgatcaacacgctcggtcctgaagggacaagcagtgagtacgcagcaaaaaacttcatcaccaattttacccttctccaaggggtgaacagcaaattatcactgcatgatacatttgaatcgtgcattgaaaaaacgcttcaaagtccgctggaatacacaattgtgcctcacgcgtatgacggcattaagcacttctacatgagaccggatctgcagcttctgcaaattttcaggtgcgacaccccgatgtacggcctggctgtccggcccggttttgaatatacagatgacatgcttgaacaggctgtcatcgtatcccacccgtctcctatcaatttgattaagtattttacccgtaaagatgtcacgtttgatctggtgaactcgacgagcgcagccgcgaaaagagtgaaggacggtttgtccgacatcgcgctgacaaatgagctggccagacaaaagtacggccttcactttgtcaaaacatttaaaagcattcccatgagctggtcattattcggaaaaggagagattcatgatgaaaactgaacaagatttgcaggaactttatttcccgacgcctaaattaatagaatgggataacggagtaagacaatattcgtccgtcagaggagatacggaagttctgctttcttacgttccgccgcatacaaacgtggaaccgcatcagcataaggaagtccaaatcggccttgtcgtttccggcgagctgtccatgactgtcggagatgtcacaagaaagatgacagcgctggaatcagcctatatcgcgcctcctaacgtgcctcacggcgcaagaaatgagacggatcaagaagtgatcgccattgatatcaaacgcctgaaagccggtgaaacctacacaagccccgaggactattttttgaatatttttaaaacgagagacttattgcctgggatggaagtcacgttcttcgtggaagactgggtggaaatcatgcttgccaacattccgggcaacgggggagaaatgccgttccataaacaccgcaatgaacagatcggcatctgcatcggcggcggctatgatatgaccattgaaggctgcaaagtggatatgacattcggcacagcttatttctgcgatccgagagaagatcacggcgccatcaacagatttgaaaaagattcaaaatcagtcaatatctttttccctccgcgctataacagagcaaaagcgaaaaaattagaggcgaaagagtcatgaacctgacggataaaaccgtcctcatcacagggggcgcatcaggcatcggttatgccgcggttcaggcgtttctgaatcagcaggcgaatgtggtcgtcgcggatattgatgaggcgcagggagaagcgatgatccggaaagaaaacaatgacaggctgtattttgtccggacggatattacagatgaaccggcatgtcaaaacgccatccggtcagcggcggacaagttcggcggattggacgtgttaatcaataacgccggcatcgaaattgtcgccccgattcatgagatggagctgagcgattggaacaaggtgctcaacgtcaatctgacgggcatgtttcttatgagcaagcacgcgctcaagtatatgctcaaaagcggcaagggcaatatcattaacacgtgctccgtcggaggagtcgttgcatggcccgacattcccgcatataacgcctctaaaggcggcgtattgcagctgacgcgttcgatggccgtcgattacgccaaacacaacatacgtgtcaattgcgtgtgcccgggaatcattgacacacctttgaatgaaaagtcgttccttgaaaacaacgaaggcacgcttgaagaaatcaaaaaagaaaaagcgaaagtcaatccgctgctgagactcggcaagcctgaagaaatagcgaacgtcatgctgtttctcgcgtcggatttatcaagctatatgaccggaagcgcgatcaccgcagacggtggatacaccgcacaatagagaaggagtgtttacatatggagagaaaaacagtattggttatcgctgaccttgggggatgcccgccgcatatgttttacaaaagcgcagccgaaaaatacaacctcgtcagctttattccgagaccttttgcaattacagcctctcatgcagctttgattgaaaaatactcggtcgcggtcattaaagataaagactattttaagagtctggctgattttgagcatcccgattcgatttactgggctcatgaagatcatgacaaacctgaggaagaagtcgtcgaagaaatcgtcaaggtggccggcatgttcgcggttgacgccattacgaccaacaatgaactgtttatcgctccgatggcaaaagcgtgtgaacgtctcggcctgcggggagcgggcgtacaggccgctgaaaatgccagagataaaaacaaaatgagagccgccttcaaccgggccggcgtcaagtccatcaaaaacaaacgggtgacgacgctggaagatttccgcgccgcgcttcaggaaatcggaacgccgctcattctgaagcctacatatctggcgagctccatcggcgtgacgcttatcaaagagatggaaacggccgaagccgagtttaacagagtcaatgaatatctgaagtcgattaacgtaccgaaagcggtcacgtttgaagcgccgtttatcgcggaagaatttttacagggcgagtatgacgactggtacgaaacaagcggttattccgactatatcagcatagaaggcatcatggccgacggggaatacttccccgtcgcgattcatgataaaacaccgcaaatcggattcacggagacatcgcatattacgccgtccatcttggatgatgacgcgaagcggaaaatcgtcgaagcagccaaaaaggcgaatgaaggactcggcctcgaaaactgcgcaacacatacagaaataaaattaatgaaaaaccgggaagccggactgattgaatcagcggcacgatttgcgggctggaacatgattccgaatattaaaaaggtcttcggcgtcgatatggcgcagctgttattggatgttctctgtttcggaaaagaagccgatctgccgaaaggattattggagcaggagccatgctatgtcgccgactgccacttgtatcctcagcatttcaaagagaacggccagctgcctgagacggctgtcgatttcgtcattgaaagcattgacattcccgacggcgtcttaaagggagacaccgaaatcgtttctttctcagcggccgaagcgggtacatccgtcgatctgctgctgttcgaagcgttcaacagcattgcggcgtttgagctgaaaggaagcaattcgggtgacgtggccgaatcaatcaaacaaattcagcagcaggcgaagctgactgcaaagtatgcgttaccggtatgaaacagctgaaaccgaactctaagtatttgcttttcgggcaggcgctttcgtttatgggagactattgcgttctcccggctctgctcattttgtctacatactatcacgactactgggtgacgtccggcgtcatcgcggtccgcagtattccgatggtgtttcagccgtttttaggcgtgctcgtggaccggctcgacagggtgaaaatcatgctgtggacggatgtgatcagaggtgtcatctttttggggctgacatttctcccgaaaggcgaatatccgctgctttttctggcgctgctgtttgtttcttacggaagcggcgtgttttttaacccggcacgtctcgcggtcatgtcgtctttagaagcggatattaaaaatatcaacactttgtttgcaaaagccacgacgatttcgattattgtcggcgctgcagccggcggactttttctgttgggcggttctgtggagcttgccgtcgcgtttaacggggtgacctatcttgtctccgcgtttttcatcagccgcattaagcttcaatacgtgccgattcagtcagaaaacgtgagagaagcttttcagtcgtttaaagaaggcctgaaggaaatcaaaacaaatgcttttgtgttaaacgccatgttcacgatgattacgatggcgcttttgtggggtgtcgtctacagctatttcccgattgtcagccgctttttaggcgacggggaaatcggcaatttcatcctgacgttctgtatcggcttcggcggctttatcggcgccgctcttgtcagcaaatggggctttaacaacaataaagggctgatgtattttacagtgttatcgatcgtctcgcttgcgctgtttttgtttaccccgattttcgccgtgtcagtcattgccgccattcttttctttatcgcaatggaatacggtgaagtgctggcaaaggtcaaagttcaggagaacgcggcgaaccagattcagggccggatcttttcggtggcggaggcgtccatcggattgtgcatcgccgtcggttccatgctgatcaacattgtagacgcggcagtcatcatggcgtttatcgtccttttggtcagcgggctgtttctgcatacaaaactggtcaataaatccttttcagaacggaataacgaatcagagcaaattcatttataaggagccttttcagatggaaatcataccgtccgacgtcattaagacacttccgaaacaggaattttcgctcgtttttcaaaaggtaaaagagatggagaaaacgggagctcagatcattaacctcgggcaggggaatcccgatctccccacaccgccgcatatcgttgaaacattgcgggaggctgcgctgaatccttcgtatcacggatacggcccgttcagaggctatccgtttctgaaagaagccatcgcggaattttatgagagagagtacggggtatcggtcaatccggagacagaagtcgcgctgttcggcggagggaaagctggtttgtacgttttgacgcaatgcctgctgaaccccggcgatatcgccttagtcccgaaccccggctaccctgagtatttatcgggcattacaatggccagagcggagctgcatgagatgccgcttcatccggaaaacggctatttgccggattttgagcggattgatcccgccgtcctgaaaaaagccaagctgatgtttttgaattacccgaataacccgacgggcgcgactgcagatcaggcgttttatgaaaaagcggcagcgtttgcaaaaaaacatgacatccaccttattcacgattttgcatacggcgcgttcgaatttgatcagaacccggccagctttcttcaggcaaaagaagcgaaaacggtcggcgcggagctttattcattttcgaaaaccttcaatatggcaggctggagaatggcatttgccgtgggaaatgaaaaaatcattcaggcggtcaatgagtttcaggatcacgtcttcgtcggcatgttcggcggtcttcagcaggcggcagcggcggcgctgtcaggaaatcctgagcataccgagcgtctgaagcgcacatataaagaacggattgactttttcacggcgttatgtgaaaaggaattaggctggagcattgaaaaaccgaaagggactttttatgtatgggctgaaattccgaatgaattcgagtcttcacaccagttttcggactatctgctggagcatgcccatgttgtcgtgacgcccggcgagattttcggcagcggcggaaagcgttatgtcagaatatcaatggtggccaagcagggcgatttgagggaatttgtggtgcggattcaaaagctcggtttgtcctttccttcattacaagaaacatcccgctgagagcgggatgtttttattatatgcttttcatgctgccgccgtcggctgacacttgctgtccggtaatataggaggcttcttcagaggcaagaaaggcagccagcgccgcggtttcttccgcagttccgacacgcttcatcgggacgcctgatgcaatccgttcttccgcttccgctttagaaatgccgttttgcttcatgacattcttcacgaattggtgataacggtctgtggcgataaacccgggattcagacagttgacagtaatgtgaaaaggcgcaagctgaatggcgatgtttttgctggcattaattaaagcggcgttcatcatgctgttggtaaacatattggcgccgggttctttccataggtttccgacgatattaatgattctgccgaattcgtgctgtttcatgattgctgcggccgttttcatagagtcgatataggcgatcgttttattcgtaaaggtatttgtcatatcctctatatcacagttttcaaaggtatccggcgagccgcccggaatgttgttgatcaatacatcaagccgtccgcattgtgatctgatctcttcaaaaatgccggctcttgtcttctggtccgacatatccccggccagaacggtgacgcccgcatccggatgtttggcgaggatctcttcttttaccgattcgatattttcgggaactcgtgaattaatgacggtatgaaagccattgtccgccagtttcagagcgatcgctttgccgatcccctgactggctcccataataaacgcggttctttttgacaactgtctgcacccctttaccaaaatggaatctcctttacatcgtaaaaaaaaatgataaaaatagcaaattttatttaaattctgacaaagaaaaaacccgccggacaggcgggtgggtgggtgttacacgtgcaaaaacttcggaagcgtgtcgagggacaagcggtttccgacaaaaaatgaaccgaattcgccgtagcgcgcgctgacttcatcaaagcgcatttcgtaaacaagttttttgaactgaagcacatcatcgctgaagagcgtgacgccccattcgtaatcgtcaaaaccgacagatcccgtgataatctgtttgactttgccggcatagctccgtccgatcaagccgtggcttctcatcaggtttctgcgttcatccatagaaagcatgtaccagttgtcattgccgcttcttcttttatccatcggatagaagcagacgtatttcgcttcaggcagctcaggatacaggcgggcgcggacatgcggattttcatacggatcgccttctccgcttgcgaggtagttgctcagctcaaccacggacacgtaagaataagccgggattgtaaattcagcaagctttgatttgttaaattcaagctcgatttcgttcagctcttccattgtcgggcgaagaatcatcagcatgaaatcagctttctgtccgacgatgctgtagatggtttgcgagcctttgccttctttttgggcgacgccccatttttcaagcagtcccgtaaattcgtgaataatcgacaggcgctcatcgctggataacattttccatgacgtccagtccattgtgcggaaatcgtgaagcgcgtaccagccgtcaagcgtttgggcggcttcgttcgttttttgctgctcactcatgtatcttcactcctatatcttttcattgatgccttcactatatcacagtttaaccgtttcggctgtggagaaaccttgaataatccgaagccttgtgtcagaaaataagccgtgaaacaaaccgtcaattaaattagttagaaaaataagatttctttttgaaagcgctataatggaagttggttatttgaatttagctggaagaagagtatgctgtaaaagtaagcgttttttgtcaacatagaggagggtatatcgtggcagatttatttacaaaagtacaagaaaaagtcgcaggaaaagatgtgaaaatcgtatttcctgaagggttggacgaacgtatcctggttgcggtcaacaacttggcgggcaacaaggtattaaagccgatcgtagtcggcaataaagaagacattcaagcaaaagcgaaagaattaaatcttacgcttgacggcgtggacatttttgacccgcatacatatgaaggcatggaagaactcgttcaggctttcgtagaacgccgcaaaggcaaagcgacggaagaacaggcccgcaaagctttgctggacgaaaactatttcggcacgatgcttgtgtacaaaggtctcgcagacggacttgtcagcggagctgcacattctactgctgatacggtgcgccctgcactgcaaatcatcaaaacaaaagaaggcgtgaaaaaaacatcaggcgtcttcatcatggcccgcggtgacgagcaatatgtattcgctgattgcgcgatcaacattgcccctgacagccaggaccttgccgaaatcgccattgaaagcgccaatacggctcaaatgtttgacattgacccgcgcgttgcaatgctcagcttctctacaaaaggatcagcgaaatcagacgagacggacaaagtggctgaagccgtgaaaattgcgaaggaaaaagcgcctgagcttacgcttgacggcgaattccaattcgacgctgcatttgtgccgtctgtcgcggagaaaaaagcgccggactccgacattaaaggagacgcgaatgtatttgtattcccaagccttgaagcaggaaacatcggctacaaaatcgctcagcgcttaggcggctttgaagcggtcggaccgattctgcaaggattgaatatgcctgtaaacgatctttccagaggatgtaatgcggaagacgtctacaatcttgcgttaattacggctgctcaagcgctgtaatccgcaaaatgccggcctttatgagggccggcatttttttatagaaagaacgtcactgcggcccagccgaacagggacaaacagagagaaccgatcaagcctgctgcgagcgcgcgccagccgttatgacgaaacgccgatatatggactttcaaaccgagacccgccatcgccatgccgattaaaacataagacacttgaacaagaaacgcggaaaacgaggctgaaataacgcctgatgtatggatggcgctcattccgagaaatccgaagataaaccaagggatggggagcgaagcggcagaagccgtctctgactttccgctgcggcgcgcccgcattccgagcatgaatgcggccgggacgagcagcgcgacccgggtcagtttgacgatgaccgccatctcgacagctgcttttcctccggcgctgccggccgccgccgcatgcgccacctcgtgaagcgttgccccgcaaaaggctccgtaagccgcaggagaaaagcctaatccatgataagcaagagaatatacaacagtaaaaatggttcctaataacgaaacggcggccgcgctgatggcggctgcgttttcatttgatctgatctgcggcgcgatcgcggcaatggcagccgctccgcagatcgctgtgccgcaggctgtcagcgtgctgagtgtctgatctatacggaacagccgggacagtccgtatacaacggcacccgcaaacatcatacagcagacggcaattgcaaatacgtgccagcccgcatgatagatatccgccagattcagtctcatgccaagcaggatgatgcctgctttcagcaagtatttgcttgagaacgcgatccccggctctaatgccgcccgctgtccgaatacggcgcgccaaagcatgccgatcagcattgcaaggacaagcattccgagcatttgcaaaaacggcaggcggctgacgtagaaagccgcaaacgcaattcctgcggtaactgaaataccttttaccatcttcatctcagtcacttcccattatcttgataactccactttactgcggtcttaatcattagtaaaatatatttatatgatctaaacgattaggaaaaataatgattaggggcgatgctttttgtattatggggaactgaaaacattcattgccgtcgtggaagaaaaaaactttacaaaggcggcgcagaagctgatgatttctcagccgagcgtcagcctccacattaaaaacctggagaaagaatttcaaaccgctttgctgaaccgctctccgaagcactttacgactacgccgacgggggacattctctatcagcgcgccaagcagatggtctttttgtacgaacaggcgaaatccgaaatttacgcccatcatcattatgtcaaagggaagctcaaaatagccgcgagctttaccatcggcgaatatattctgccgccgcttctcgcaaagcttcataatgagtatcccgagctgaacctggacgtcatgatcggaaacacggaggaggtcagcgaagcggttcggatgcttcaagccgatatcggattaattgaagggcatacggggaaaaacgagcttgacattcagccgtttatggaggatgaattgtgcattgccgcaccgaacggacacccgctcgccggcagaaaaaacatcccggctgccgaattgcaaaatcaagcgtgggtgacgagggagaagggttcgggaacgagggaatatttagaccacgttcttcaatcaaacggactgcggccgaaatccatgatgacgatcagcagcaaccagggcgtcaaagaagccgtgatcagcggaatgggtctttccgttctgtcaaaaagcgtggtgcaaaaggatctgcttcacggcagcatttccgtgcttgagataaaaggattctccttaaaacggaaactgtctatcatccaatcttccattatggagaacacaaaaaacaaagaaatcttcatcgcacttttgaaaagccaatttcaatcatctcaagcggagtgatataataaatgcatagaaagcctatgacgaaagggatttaatatagatgggaaagcaaccgattgatttactgatgcagccgagctggagaatcattgaccaatccagcctcggcccttattttgatgcgaagcagtcattcgcaatggatgatacgctgtgcgcctccgtaggcaaaggggaatcgcctgcgacggcacgctcctgggtgcaccaccggacgatcgtgctcggcattcaggacacgcgcctgccgtttttagaggacggcgtgaaattgctggaggacgaaggctaccgtgtcattgtccgcaattccggaggcctcgccgtcgtactggacgaaggcgtattgaatatctcgcttatttttgaagacgagaaaaaaggcatcgacatcgacagaggctacgaggcgatgacagagctggtgcggcggatgctgcgtccgcacaatgccgaaattgaagcatatgaaattaaaggatcgtactgtccgggcagctacgatctcagcatcggcggccgaaaattcgcgggaatctcacaaagacgcctgcggggcggaaccgcggttcagatttacctctgcgccgataaaagcggaagcgaacgcgccgatctgatcagacgtttctatcaagccgctttaaaagacaaaagcaacgatacaaaaggcgtatatcccgatatccggcccgaaacgatggcttcattaagcgaattgctgcaaacggacattaccgtgcaagacttaatgctggcgcttttgaccgaactgaaggaactcagcggccgcctgtatgcagccggattatcgccggaagaggaaatggtatttgaaaaaaatctgacccgaatgctggaacggaatgagaaggtgttcggcacggaggaaagcttggactgagtccgggcttttttgctttttggtaattatatactatttagttatagtaaaaaaggagtgttataccaaaactagtttacattatataccttatttgattaatatatttatgtaggttccaaataattctataaactgaaggagatggagatatgaactttaaaaaaataaaagaagaaaaaagaatcacgatcccgacacatttgttagccggagatgcggaacaatcaggcaattctttcgcttggagcggctgggtgcttgtagtgccgagccaagaagacaatcaaaacccgaatttaaatttctctgatttagccgctcaaaagtaggataatcactgtttggagcctacacatctgagacgaggcggtgagagtgtgacacaagagtatataacagaaattaagcggggagcactgtcatggattgttaaaaatatccattattttgatatgaatcataaagtagcgagtgatttcaggtggcgccttaaaacatttatagaactcatttttcttaccaattacctgatcagaaatcaggcagatgataaggaagttgctgttttaacggagtttattacagaaaggctccataatgatcagcttgaagaatttattcattttgatccggacggtctcgccggattggctattgcgggtgaatttcttaccttgactgatcatccgtcacgggctttggtgatatgggagctggaaaaattcacggcagcacgttttgattgcagccttgctaaaattccctttcggaaaatggatctgaagtacagtctgcaaagagcaggcgtaacctcggaaataacggatttttctgacttatatcactacacagcagctggtcaggatgtcccaaatacatatatgacggatcatgatgcgtacagtatcactcatacgattttttatataacagacatgggatgttcttcgcttacggataaagagtatcatctgccgtccttaaaagaaaaggtcctgaaatttctcgggatctatatctgtcttgagaatttagatattaccagtgaattattgatgtgcagctcttttttacatatcgacatggataaggacaaccataaaccgctctatgaagcagcctggaataaaatctatcagggccgaatgaaagaggggaatgtcccgagcgtcacctatcaacataaacccggtttgaaaggtgaacagcgaagagaagatgtgtttaaacattgctatcatacaacacttgtcgccgcgggtgccgcgcatgcctgtcttagagcagaaaggaacgattaacttgaatagattagctgaagagacagatcaatttttattatcttttgctgaacaatcgcttccggatcaaaagagcattcagctgtttgccggcttctgcaagtactacaggaagacgagccattcttccgctgtaaaagaacatactgaaaggattgcctccgctttcgttgataagtcatgctgggaagatctgtttcactgtaacacggccattgtcaatgagttgattcatatctatttaacggcaaaagcttataaaaagaagcagggaatggattcggatgatcaggtcatacgtcacggattgcaaaacggctatcttataaaaaaagaatggccttattttaaatacgccgaattcgtcggtttgctgagcgagctgggattgtcaactgaccatgaaaaagtgcgcttttacaagaattcgatgtttcagcctttgctccatgacgcatggaaaagaacagctgaaaacgagctggagtttgtcgagtactgtcttcttcatttagatcagggagagcatctgcttcatcccggcttgaaggcttccattcaaaaatggcttgtattttgtctcggcaaccgaaaaatgaaacagctgtgcaatatgttatttatccaatcgtgtatcgatccatttttttatggctgtcaagcggctcttcatcatataaataacgagagtccatccattcattgtgctccggctcttctgccggcgattgagattctgaatctggagtgtggaacatgcggatagtcaaggaacattttaatataaaaaaaacagaagaatggctgctgggtttttggaagaacattcagctgcagccggaagaaatagaagcagatgatctcatgcacctgttttgcggtttagcggcatgtcatcactttgaaaaaagaaaggatacagaagaagtcattctattcttagaccgttattttggagaaaaaacgcacgaatgccatccggtcctgttcgcgtatgcgtatcatgtgtaccgcaggatagatgccgcaaaaagcatcttttttcataacggacttgaacaaatggtccgcggtttacaagaggaactgaaatcacagccttcctctatgatcctcatggtattaggggcttattttggggcggtgactccggaagaactgatcgtgttcttagaaaccgggatgaaacgtgaggccgatttgctcatggcaccgggcggcattcaggaagaacaggcggatgccctttatgccgtcacttatttgcaaatgaaagaattgcagccttttctcacggaatggtacaaaacatcagactttgctttttcaggtttaatgttagccgagtgcagaaagtatcacattgacgccgttgcaaaatacacagccattatgaaatttctccaattcgatgaggcgctttttatacgggaagggcgggaatttctacgctttcagcagcgaagcagcgggagcttcggttatttgaacccattagcgatggaccaaggggcggtcagcggcaaattgctggcccgtcaatatttcctgccgtccgctcattatgccgccgcctctctgtctatgctgtaatgtctctcttttgaaagacggaaaaagaaatcaataaacaaataagaaagtagatcgctataaccgtcatggaataggggatgtttaacgttgaaatcgcatcacccgcgcttttatttacataagcaacgagatttaaatgcggaaagagtgtaaatttataccatgtaaattgggcaagcaaatcagttccgcccaatatactgccggcaaacagcagtaaaatggataagcaaagggagagcgcctggcttttgcacaatactgacaaagtgaacgcaatggtgacaatacttataattgatatgaaacgcaaaagcagaatgattccggatgctttgattgaactgatggtatacagactgtcatttaaatgagtatagacgagcggatatgaagcattggaaaaaccgaataacacgccgccgatcagcaaacagctcacacagtaaaataagtaaaccatgccggtaaacagaagagacgccagaaatttcgatgttaaaatccgccatcttcggttcgggcttgtagcgataaacttaatcgtcccaagggcaaactctttagaaacaaccccgctgacggttaaaattgcggttaagcttacgaaaatctcaagcccgtttgaagtaaccgtgccgaaaaacctccagccgttccattcataagggttgatgttatgctccaaataatagtctttattcttaacatcagcagaataataaacgcctgtcgtttcagccggtttatcaatttcttcctgttttttttcggcgagaagccgttctttccaattgttatccgaggaagcatctaactcatgattcataataaggccggccagcaaaacgatgagaaacaggaaaaaaagagataaaagtgtgcctttttttcgggttatttttatgaattcgttctgcgccagatgaaatatgctcataccgcgtcctcctgatctgtaatcatcatgtatttctcttccaatgacaaagttcttgcagaaacgcgggaaatcagaatctctttctctgccaaagatttaatgacatacgggatggtatcttcttccgcttccaattcaatgatgcggctgtctttttgctgtacttgaagaataccgtcctgctctaatatttctttcgcccttgccggatgatcgaccgtgacggtaaacagctttttctgaccaaggtcatgtctgttcttcatgtcttcaattcctaaaatccgtccctttttaatataggcaaccctatcgcaaatctcctccatttccgacaataaatggcttgataataaaatagaaaccccttgcttcgctaaatcggaaagaatggtgcgcaattctttcatacctttaggatcgaggccgttcatcggttcatccagaattaataatccgggattgtgaagaagagaataagcgagccccaagcgctgtttcatacctaatgagaaatgtttcacttttttgcgggcagcctgctccaatccgacttttgcaagggtattcataagctcatccgttcgcagcgaggtgctgcgcagtttagtaaaatattttaggttttgcaaagcgttcatattcggatacatatccgggccttcaatgataaccccgatatgtctcataaaatattcaaagtcgctgtccggtctgcctctgaatgaaatggctccttctgtttttttaataagctgtacgatcattctgaaaatagtggtttttcctgagccgttcggccctaaaaggccgaatatctcgccttttctcacatcgaaagaaattgactgtacaataggggtatgattgattgttttagagacatcttttaataacagggctggttcagtcatgatatttgcacaccttccttatgatttagggtaaaagccgtcaaaaccgaagaacatgcttccgatcaggccggcaacgattaaaatgagagcaatgctataccacatttttcgattcaatggtttccctccttacaacgctgacattccatttgaaatagcgcaaaaagatgcggaatatcagtttcgaaagatcaaatccggccataaacaccgccatacccgctccaagaaccatacatccgttaaaaatggctgttacaatcggcacttttacaaggagaaagaatgatccggtcatcagcatcaggccgatcgccatcaaacttaacaccgcaacagaggcaaaaagaaacggtgtcagcataaacatgaagttgaacatgcccatccccagcatcaggccgaatgctttgaaaaaggagcgccatgttttctgctcctcggcatcactgatgaaaatatccgcttttaaggcgcgcgcaagtgttttggggtttcctaaattgcccgcgatttgttcatcgctttttccttcagcgccgcccatttggaatatttcgccgatatcggccagtatctctttttgctcacgttccggcagatcttttatttcccgccggagatgttttaaatattggtctttacacattcattttccctccttaatgatgctgttcactttttcggacaggtcaagccattccgattttaatgtttgatgataaaaggcgccttcttctgttactttgtaatatttgcgtgatgggccttgatcggaagctgctgtatacgtttttaggtagttattttttgtgagtcttcgtaatatggggtagatggtgccctccgatacagggaacgtttcacttatgatcttgattaattcataaccatataaatcttcataaagaagcagggacaacacgcaaagttccaacgctccttttcgtaattggctactcatttactatcattcccatcatatctaataattgtattctctatacagtgtattgcacagtagctaatcgatcaataattcccaagaaccatttcggatgaggaattgaatctttatgcttatgtgcgggcggggaccgagatgcgcaccccttgcgggaagaaggcctcctgaacaatgtttacattaatatagatcaggatgcgcgtcattgacaaatggcaaaaacccctttttccatgacaaggaaaggggtttttccattattcggccattttttctaaattgccgttccggtccattttaaaggacggagaggcatgttcatcgtcttcaaataaaactagttttctggctctgttcataattttcaccaaggtttcgtagtcttcctgaatggttttttgatctttttcaagcttttcgacggccgcttccagctgctcggttttagactgaagttcttggttttcccgttttaaacggtcattttccatttgcagggcggaagtttgctttccgctgccttcatagctctgcagaaattgaatgacatctgccattgtgagctccgccttttggctcggctgctgaggcgccagcaaatgtgataaactagctaactcttccttgaagctttcatcgacataaggcatatgttcgccggacatgacggcttgccgatcctcttttggcgcttccgtttgaaccgtctcttcggctgcggtttcctgcatgatatccgcatccggtgcaggcggctgatataatagtttcttcttggccggctggccgtttccgagcgcgcgcatccgctgtttccgctgttttttggcgagctgaagcgctttttcgtattgatggcggacgacggcattccatctgaaaccgcacgctgccgacgttctgtttaatttatcgcctacctcttcaaaggcgttcagctgcgtgcttccttcccgaacgtgacggagcacggtttccgcaagcagcaggtcgttttcctccgaccaggcgtcctgtctttgttttgtcaatgttctcaacccccaatatctttgatggtattagaatgtccagattggaaaatatttatacaaattggctgaaagaatgagagatacgcagagccttgcaggataagatgaatccttgtacaatgagatgtgatgtgatttttttcttttttaaaattaagatttaacatagaggaacattgaatgaagggaagcgtacatcatggctaatgaattccgagtgtgtgatgattgccaggccaccaatattaagactttgctgccgcgtttgaaagaagctgacccggatgcaaaagtggaggtcggatgtcagtcatattgcgggcccggacgcaaaaaatcgtttgctttcgtaaacaaccgcccgctgtcggcgccgactgaggacgagctgattgagaaagtgaaaaagaagatcaaaaagtaaatgtgtatttttacgacagcctcgcccgatgggtcaggcttttttgcttcaaaaaatcaatgtcggaaaactggaacaaaacgccggacaaattcaaggatgttttcaaattacagagccgatataatagaatcacggctaaaaaaaagagggaatgacgatggcgtatccaaacggaaaattatcagaagaaaaagtgtttaaagatcccgttcaccgctatgttcatgtgcgggacaagctgatctgggatttgatcggcacccgtgaatttcagcggctgcgccggatcaaacagctcggtacgacgtatttgacgtttcacggcgcggaacacagccgttttaaccattctctcggcgtctatgagattgtcagacgaatggttgatgatgtttttaaagggcgtcctgaatgggatgacaatgaacgcgaactctgtctcagcgctgcgcttttgcacgatttgggacatgggccgttttcacattcctttgaaaaggtttttcatctggatcatgaagactttacgagggaaatcatcctcggcgatactgaggtgaatcaggttctcagaaaggcggggccgggattcccgcaggatgttgccgaagtcattgccaaaacatacaaaaacaagcaggtggtcagcctgatttcgagtcagattgacgccgaccggatggattaccttcagcgggacgcgtactatacgggcgtcagctacggacattttgatatggaacggattttaagggtgatgcgtccgcgtgaggaccagatcgtcattaagcaaagcggcatgcacgccgtggaagactatattatgagccgctatcaaatgtactggcaggtgtattttcatcccgtgacgagaagcgctgaagtcattttgacgaaaattctccaccgtgcgaagcagctccatgaagaagggtatatattcactcatgctcccgttcatttttattccatttttgaagggaagctgacgcttgcggattatctgaagcttgatgaagccatcattttatattatttccaggcttgggaggaagaagaggacccgattctgtccgacttgtgccgccgcttcattaaccgtcagctgtttcaatatgccgaatttaaccccaatgaggaaatgtcggcttattttgaactgaccgctctgtttaaagaggcgggaattgatcccaattactatttagtggtcgattcttcatcggatctgccgtatgatttttaccggccgggtgaagaggaggagcgtctgccgattcacctgttaacgcagaacggccagatcaaagagctgtccaggcagtccgccattgtcgaatccatttcgggcaaacgccggacggaccataagctctactatccgatggacctcatttgtgacgattcagaaaaccctgaagcaaaattgaaaatccggcagctgctgggactgacatagaaggattttggtaaagaaggaaaaggagatgtcgggaatttgttgaaagaacatgcaaaactgatgaaggtgttctcggattctggagaaatcatcgggcggaaaaagctgcagaaaatcatttatatcgcgaagaaaatgcagtatcctttctacgaaaaatatgattttcatttttacggcccgtattccgaagaactgacgcttcgaattgaagagctgtgcaatcttgggtttctggatgaggtgaaggaaaaaaagggcggctactttcaataccggtactcgctgacggagacgggagccgagtttttacatcatgcggagcttacgatgccggatatgaagaagtacatcgacagcgtcaacagccgctcatcgcggtttctggagctggtgtctacgattttgtattttgacggccttgaagctgaggaaaagaaagagaaagtgtttacgataaaaagcaaacagaaatatacagatgaagaatatgatgaggcgcttcactacatagaagagctgaaacacatttgttaaaggcgatggctttcgtcttttttgatgaaaaaaccaggccgcgataaagcgggcctggttttgtttattgtctcaatttgctgtgcttgtacgaatataaaaagtaaacgatgacgccgatgatcagccagacagcaaaataaagccacgttttcagcggcagattgaccattaaaaacaaacagcagataatggccaaaatcggcagtactggtacaaaaggcactttaaatccccgcggcagatccttatgggtgcggcgcagaatcagcacggacagactgaccatggcaaatgtcaatagcgcgccgatgtttgagagatctgacagctctttcagatcaacaaaacccgcgatgcaggcgctgatcagtccgatcagccacgtattaaagatcggagctcccgatttctttccgacaatggtaaagactttcggcagcattccgtctcttgccatcgcaaaagatatacgggtcgccgcatatgtatgggcgagaacgacggccatcagtccgatcaccgcaccggcagcgataacgcccgccaccgcgttttgtcctacagtctgtaacacataagacatggcttccggcacattaagctgtgaatacggaaccatacccgtcatgacgagacagacgatgacgtatacaaatgtacagatcaccagtgaaccgataataccgatcggcaggttgcgctgcggttttttgacttcttcagccgaagcggaaatcgcgtcaaatccgagaaacgcaaaaaagacggcagaagcccccgtaatgacgcctttgattccaaaaggcataaaaggatgccaattgcccggctttacaaaaaagcttcctgtgatgataaacagcaaaacaattccgatttttacgagaaccattatattattaaaggttttgctctctttggagccgcgtgacagaacgacggcaattaatagagtaatgatgatggcaggaaggttgacgatgcccccctggctcggcacgtgcagcagactgtccggcaaaggcatgccgatttcggctaacagattattaaaataacttgaccagccgcttgccaccgccgacgccgtcaccatataaacggataagagcgtccagcccattaaatggccgacaatttctcccatggtggtataagagtaaatataggcgcttccgtaaaccgggagaacagaagcgatttcggcgtaacataatgctgcaaggctgcagacaacggctgcaatgataaaagaaaagattacggaaggcccggcatttttcgcggccgtaatgcctgtaagaaccatgacgcccgtcccgatgacggcgccgatgcccagtaaagttaaatcaaatccacccatcgttttggcagtctgcctgtttctgctttgttcaagcagctgggtgatgtcttttttttgtaggatattccgcaacacgcatccctccatccaaaagcaaaagccaagaggggctctttggcttttacccgtgtcacatcttctgtgtaatcgacaatcctgtgttctgtttccccgtctgttccgtttcttttccagtcatattgtctgccgcatccgatcagattatcctttccgtcaaacgcagtcacccttaatgattttacctgaatcatgtctataaaaccagcattgcataaaagggataggtgaaaaagtaggagataatagtctgtatagagcaggataaaagttgcgggctttccggccgaaattttgactttccccgcgaggtatcagtaaaatgtaataaaaaacaatcaaatgatgatggatgcatcttgaaatggggagtttctgcatggagcatgatatattgcaagcaaatgtactggattacgcgctcacgaaatatttaaagagcactaaaaagcttgatgaggcgacaattccgaagagtataaacaatatcagaggatttattctcaggattatttaccggcacggcacgtgcacgattaaagatatattgcaggaagtcacattatcgccttcggccacgacaaccgctctgaatcatttagaaaaagagggtttcgtggaaaggtcgagaaataacgaagaccggcgcacggtatggatgacgctttccgaatcggggaaaatggcggccatgcaaatgattgaaaaccggcagatgctcattgacgagctgtttgaagcattgacagaggaagaaaagaacacctttttcagcctcgttgaaaaagtaatgaaataagccggcctgacatagcagcgccggccgttatcaaggattactccgtatcgctgatccgtttgccggcgacggcgtaatgatcctttctcatttcttcaatcatgacaatgatcttttcttcggctgcgcctgtcgtttcttttacggcttctgtcactttttcaaccagattccgtttttgttcatctgtgcggccttcaagcattttaacggttacgagcggcatggtgctgatcctcctttatcgtttcctctctttggaagagaggtcacttatagtatactgaatgaaggacaatcttgcattttttaaaaaaggggatttttacatttggacagatttttatattatccgctggagcttatgccctatgtcgtgattacgctgatcgtggcatttacgatgcatgaactggcgcacgcgtatgtcgcgtatcggttcggagacgataccgcggcgagacagggcagattaacgctcaatccgattaaacatcttgatgttttcggaacgattctaattttggtcgcgggtttcggctgggcccgtccggtgccggtgaaccgccgcgcctttaaaagaccgcggctggcgggagtgctggtttccgtcgccgggcctgtaagcaacctgcttcttgcctttatcggtttctttttgctagtgttgatgcatgcttacggaatggagctgctttctgcattcagcatggggcttgaccgctttttctctatttggattcagctgaatctcgcgctgtgtttattcaacctgctgccgcttcctccgcttgacggctaccggattattgaggatctcgtgccgccgcgggtgcgcgccaaaatgactcagtttgagagctacgggattatcgtgtttctcgtgctgtttgtgacaccggtcggctcctatgtcgtgtggccgctgttaagcgaggggagagactggattctcaaggtatttgccattatatttcaaccgcttttgtaggagggtattttcatggaagaaaaaaagaagaaaacaatcggatttaatattattaaaagtgatccgaccgacggacatggcggttttggcgccggggcgctgagccttgacaatatttctccggtatttgtcgatgtggaagagaaggaagccttcgttgacatcggcgcaatgcatgcccgcagtgtcgttgaaaaaggcatcaaattcctgccgaacaaagatgaagtgccgaacggaaaaccgtactggctcgtgtgggtcaccatcgacagaaaagaagaaggcccttattacgcgggtgtgacggcttgtgaaatgaccgtggacagaagtatccgcagaggctataagtcattgccggagcatgtgaatttaatggataaatcaatgaagcgctgcattatcgtggacaaaatggacgccagctcaaagcaggtgcttgctgaatttctgcagaagcatgaccaagggctctgggaacgttcatccgatgaattgaaaacaggtctgcttccgaaagaaaaataatttgtgaactttttgtgaactttataaatatttgcactattttgcaattgtactgagtaaactgttgatacagaatcaggacatggaaagtcccgagccgaaccaagactcggggtttttcatgtttacgcggaggtttcatcatgttcaccgtctttgaaatcgggccttgggtcattgaagcagatgcggcggaaacgagaaaacaatacgaaaactcatggcctgatccttgcgcgattgcgggagctgccggaacttttccgaggcggtgaatctcctttccgccgagaaaacaaggctgtttacgcagtttgggattcgtccggctgtctgtcacgacttgggggagcatggaaaggaaaacggcctgcatcattatgcgggcagctatccgattgtcggcaggtttagggaaggctggccgaagtttcatatcgagagggcgggagatatccgcttttcgttttcattgccgagtacaacattttttataccgaagggttttcctgaccctattatccatctcgacttttctcttttgctcccatgggtgcttgaggaagacgcggattaaagcccggcgcgcaatgcaccgggctcagtcttttttgccgagccacttatcccaccattttttgcgcggagcttctttgcgggcgggggcgtgtttcttttcttttttagacggttccgctccgtagcacacatccgcgggctcagtgcctgcgatgaaatacgtataatgctttgcggcgcagccgggtcccgaagtgtagccggaagcgggatcgatatagacgcccgtgacgcccttcggcggtttaagcgctatttccggttctccttcgagcgccttctccataaagtccgcccaaatcgtcttcgcatagcttttttcttctactgaatcaatcgtgctgcttttgtcatagcctgtccatacaccggcggcaagagccgggttaaagccgatcatccagctgtctgcgctggtcgtgcctgatttaccgccataggttcgggtcagccggtcagaaatggtgcgtcccgtgacggaagtatagccgtttaaatcctgatcaaacatgcccgtcatcatgctcgccgtcacaaaagcggcttttttatcaagcgtctgctgatgtccgcgcggctgttcatacaagacgttgccggcggtatccgtcacttttgtgataaaggaaggggtgatttgttttcccccgtttgcgagcatcgcgtaggcattaaccatctcaatcgggcgcacgggttcagttcctagcgccagagacggaaggggctttaaatgttcgctgatgccgaattcctttgccgccgacacgagcttattcatgccgagaaagagatgggtcttcacggcataaatgttgtctgacaacgcaagcgcctgaagcagcgtaatcggtttattggcgtagtagccgttgtaattgcttggagaataagtatctccgttgtcgtcaatctggaactctgtggcttcgcttttcatcagcgtgaccggtgtaaagccgctttgaatcgctttgtagtacaaaagcggcttgatcgtggaagccggctgccgtttcgcctgtgtcgcccggtcaaacgggcttttttcgtagtcacgtccgccgagaagcgcaagcacgcgccctgttgccggatcaatcgcggaaaagccgacctgaatgtcagagccggtacggatcgtatgtgccacagtgttttccgcaatccgctgcatgcgcttatcaagcgtcgtataaacacgcaatccgctcgttgcgagctgttcgcgcgtcatgccgagctttttctcgagttctttcatcgcatcatcgtaaaaataaggcgccgttttcgctgcggttctgtttttcagcggctgataggcaagcggcattttcttaagcctttctgccttcgtttttgagatcattttctgttcagtcatcagtcggagaatggtttcctggcgctgtttggccttcttttcgctgacatatggcgaatagccggacgggcctttcggtatgcccgccagaagcacggcttccgcatcgttcagatctttggcgtgtttgccgaaatacaggcgcgaggcggcttcaattccatatgcgccgtggccgtaatatatcgtatttacataaccttctaaaatctcgtttttagaatagttctgttcaaggcggatcgtgtaaaatgcttcgttccattttcgtttccatgtcttatcatgctcaaggtagagatttctcgcgtattgctgggtgatggtgcttgcgccctgaaccttggccattgcctttatgtcagccagcgcggcggcggccatccgccggtaatcaaaaccgtggtgattgtaaaagttttgatcctccaccgcaatcgcggcctgcaccgctatcggattgatatcttttaaccggacccagtagcgcttttccccgaaatcggtctcacctagctttgagccgtcatttgcataaagaatcgtagactgagggacccggacggagggggccccctgccatttcgctgcaagaagaacggatgtgaagcagacgccggccagcatcccgccgatcagtgtcagaaagatgcaggcgcggatgattttgaacgtgattctgagctgttttccagatactttatccacttttgggaaccccctttttcatgattctattattatgtgaaaaaagggggttttttaaacatatcaaaccggacacttctttactttttcccctccatcctctatactttttccttaggtgaaaatgagattttaaccggaataaaagcgatacagacgcttacaataaatgaaataagccttgaaagggagatgacaattgagcgagctttggtatacggagaagcagacgaagaatttcggcattacattaaaggtgaaacaaacattacatacggaacagacggaatttcagcatctggaaatggtggagacagaagaattcggcaacatgctgttcttagacggaatggtcatgacttctgaaaaagacgaattcgtctatcatgaaatggttgcgcacgtcccgttatttacgcacccgaatccggaaaacgtcctcgttgtcggcggcggagacggcggtgtcatcagagagattctgaagcacccaagcgtaaaaaaagcgacgcttgtcgacattgacggcaaggttattgaatactctaaaaaattccttccgtccattgcgggcaagcttgatgatccgcgcgtcgacgtgagagtcgatgacggtttcatgcacatcgcgaaatcagagaatgagtatgacgtcatcatggttgattcaacagaaccggtcggaccggccgtcaatctgttctcaaaaggcttctatgccggaatttccaaggcgttaaaagaagacggcatcttcgtcgcgcagacggacaacccgtggtttacaccggaactgattacaaacgtacagcgtgatgtgaaagaaatcttcccgatcacccgtctgtatacggctaatatcccgacgtacccgagcggcctgtggacatttacgatcggttctaaaaagtacgatccgcttgaagtggaggacagccgtttctttgacatcgatacgaaatattatacgaaagagcttcacaaagcggcatttgttcttccgaaatttgtgagcgatttaatcaaataaaaacgtacggcgcaggagcgaatcttgcgcttttttacaggaaagcgagggttttatcatgaggtttgatgaagcatattcaggaaaagtatttatctcaagccgccccgactggaaagaggcggacgccatcctttacggcatgccgatggattggacggtcagctaccgtccgggttcgcggtttggcccggggagaatccgcgaggtgtctatcggtcttgaagaatacagcccgtatctcgaccgtgacttggctgatttgaatttctttgacgccggcgacattccgcttccgttcggcaatccgcaaagaagccttgatatgattgaagaatacgtggacggcattttagaaaaaggaaagttcccgctcggcatgggaggggagcaccttgtatcatggcctgtcataaaagccatgtataagaagtttccggaccttgccatcattcattttgacgcgcacaccgacctgcgcacggattatgaaggcgaaccgctttcccattctactccgatccgcaaagcggccgagctcatcgggccgcaaaacgtattttcattcggcatccgttccggaatgaaggaagaatttgaatgggcgaaagaaaacggcatgcacatttctaaatttgaagtgcttgagccgctgaaaaaagtgctgccgcagcttgcgggacgccctgtttatgtcaccatcgatatcgacgtgcttgaccccgctcatgcgccgggcacgggcacggttgacgcaggaggcatcacgtctaaagaattgctcgcgtccatccatgaaatcgcgcgctcagaagtcaacgtaaaaggcgctgacctcgtagaagtcgcgccggtctatgaccactcagaacaaaccgcaaacacggcaagcaagatgattcgtgaaatgctgcttgggtttgtgaaatagaaagaagaaaacccggaataacagggcagaagcagcctttgttccgggttttttgtaataggaattaaaacactcgaggggattgtacccgtaaacctaaaatgaaatctttcatcataaatttagatcatggcgcgttcagacacataataatgaggagttaagctattcattatccctgctgatactaatatcgtactcacagcaaaacagactataagtaatttatacttcaatttcatataaattcactcctccttcgatctgctgtctggcttcttcaacctttaaaaagtagacagaagcttttttatattcttcttgtgtgtaataatatttagctacatcaagggctaattcctcaatatcagcatacatcaatttattttcaagaaaatgcagacaatcgtttattaatgtatctcttggatccggcatatacaagtattctaaaaatttaaatttttcctcgtaaattatatcatctatttccttacatattgagataccttttttatgataatcgtacgcgttatctatattttttaacttaaaataaatctgtgtaagtaagaagtagggctgcggaagtgaatgactcatttgagctttttcaaaaacagctatggcttcttttaaatggggaatagcctcgactttattgttttgattattatggcataaagcgatgttaaaaagtgtcctccccattaattgcggctgctgctccaattcagccatcgtatatgccttttgaaagtgggaaatcgcgtgatcgtattgctttacatcaagataattagccccaaataaagaatggcactgggttaatctaatattatatttttctgcatctttataaattaaataagcctgccgcgcataatccatcgatacataagtttgtttcatataataatagacttctgacattttaaagtaaaattcagctttttctatatgatctttaacgtacgtcagtttgctttcagctttcttaaaaaactgaatcgctgaaagatattcacggcattccagctcatacatcccccggaaaaaattaaaataataatcaagacgtccggtcagccgggcctgctttttatcaatatccgcgagcagatccgatagtctcggctgttcttctatccgctgcgattccagcggttcgaggtattcgagcatcagattgtgacggaattccatgagagaatagtatagatgaagatcctgatcatcttccagacctgcaagttcttctttgatttctctccgcaagtactcggcgtccgggatgctgaaccttcgaatgtacatataccattcgttgattttttctccaaccgctgaagatgataaaacactcgccactattcccaatccctcccttccacgttatgtatatgacatattttatcattttcattcggaaggatagcgcaaaaataccgcaatgttttctttcgttaaaaccgcatgtctgcggatatcatttcaaaaatccactattatccccacaatttgtacaagcaaacaaatacaccttcccatattctgttgtatctgcgtgagcagtgtatgtctgaaaaggaagtgaagatatgagaaataacaagctttcctttaaagaaaaagcaggagccgcacaagaagaatgtttatgtttttgcgaggaagaagcaagccgtgaagcgatgtttcaagcgccgattgaattgcctgagggatttgttgttgatccggctgaagctgttgcaaacgtgacgtggaatgcagacagcctttcttgtgtcattgaacgctgtttcattgagacggggccagagcctgatgaaaccggtgttcaattcgcagtgcgcctgcagggaactgttacgcttctcgtcagtgtctcaccagtgcgaaatcaatatggacaagggaacgggtctgtttctgtcatccgcaatgcagagattgaccaagtcgtctattattctgatgaaccaaatgattgcccggatgtcagtgacattacgatcgagaaccttgttgtcgttccgccattctatggcagtcctttatcggtgacgggcacgattgtgtttgttcctgagccggaacccgtttatgcgtttacagcgaatccaaatgatcaatcagtttctgtgattgatacaaacactcatactgttgtgacaacgattgctctaccgtaccggccgacaggtattgaaataactccggataaaagcgctgtgtttgttttgcacttcaacaataatgtgatttctgtcatcgattatgacactttaacagtgacagcatccatactgctggatcagccgcctggatcgataaaatgtatcccaaatcatgagtttgcttatgttctcggcgatactgcgatttatgtgattggaattgatacgttaactgtggataggtcgattcctgtggaaggatttgattttgcaattgatcccaatgggttattcgcctatgttcttgattttggtttagtgcaaaaagcggacctattcaccggtgaagtcacaggaacgattgaacgagagcttatcgtatcatctatagaaacaaattggccggagcggtatgcgtatgtcttagaacaagaattcttattcaattatttgacggttattgacttaaatacgtttacgatcagcattacccaagagctggagcctgatggccaatatgtaatgtttacgagtggatcagaggtgtatttatatgacagcttcactggcaatttatatgctgtcagtccgaatggtgcaggcgttataggtaatgttccgcaatcggcaagagactttgcgtttactccgaatggcgaatttctgtatgctgctcattttttagagcagaacatcactgtttacaacacggatgattattctgtggaaactgtgatatctcttggggtttcaccgggagctattgtgatttaaccaactgcatgctgtacatttctaaaaggacgtgaattgatgaaaaagaatgatctgtctgctttacaggaaaattgtttctgtttttgtgatgaggaaattagcagagaagcgccgtttcaagtgccgattgacattcccgaggggttcaccattgattctgccgaagcagctgcgacggttacatggagtactgctcatttattatgtatcagtgagccttgcttaatccagactgggccggaaccagaagatatcggtgttcgatatgccgtgagagttaaagggaccgttacgcttcttgtcagtgtgtcgcctgtacgaaatcaatatggacaaggggacgggtctgtttctgtgattcatactgaagagattgatcaagttgtttattatgcagcgcagtctggccgctgtcctgatttcagtcaaataacagtggaagatcttctcattgtaccgcctttctacggcagtccgcttacggtgaccgggacacttgttttaccgccatcgagagaccctcaatcgtatgtgtttacagccaattcaggagacagcacggtttcggttattgattcagatttaaacactgttgtaaaaacaatccatttttctgacgtgccaactaatctaggcgttactttcgataaagctttcacgtatgtcctccatgggaataccaaccttgtctcagtgctagataataaaactttaaccatcataaataccatcactgttggaggagggccgagaaaggttgaatttgattcaacagatgagttcgcgtacgtgatggccgccggatctatatatatgatcaacatggcctctcaatcggtcattgatgtcattccgatacccggcgctttagactttgctcttgatcctaatggacagtatgtctataccgctaatggaagcagttggtcggttgataaatatgatgtaaatactgggcagttggtagaaagtatcatagatacatttgaatttcccagtttaattgccactccttacgctggaaattttgcgtatgtgttgaatggtgagctgctgccgaaaggtgtaacggagatcagtttgtcaccattaagcaggggaggcgacttcaaccgtttatttgaaactctgaggacgattgtattttctcgcgatagcactagggcttattttctagagccatatagtgaaccgtttctcattaataacttatacgtagttaatacggctggacagaggatcattgcaaacgtgtctctgcccggcgcctttgacctcgccgtaacacctgataatcagtacatttatgcagcacagcccgacgacaataccgtaaccgtataccgcacgagtgattatacagccatgacggtgattccggttggggctggtccgtcagcgattgcgatgtagcttatttcacaggttgagagaagcagagctgcgataaaaaaatcgtttataaataaatgagccgatctgctggatggcagccaggatgattaaaaacagcagttcacttatggtgaaactgagcatccaccaaaccccggctcctgtcagcgctcccgcaagcccttttttgaacaggctgccatgctggaaaagctgcagcaagtacgtccgcataaaatacaataaatacaaaatcagtaacaccgtgagtcccattgatacggcaaggggcgtgtgaaagcggaaagggacggctttgacgatttcgaacacgcagccgaatatgatgacttggcataatacagcagccatcacgtgtgtttggcggacgtttttatagctgtcacgcagcgctttgacatcgttggcatttctgctgcacaatctatgctgctggaagtcgcagcagcttcgatgagactgtttgggtttctgaaaagctgctgtcatgtttttcacggattgggtgacatagtgatatgattttctcttctcataaggaactgctttttatgaggtttatcttcaaatctaatgagcaatgatggtaagatagaagcagttgaagtttacaaactgaaggattatactattcaagtcaaagcggaatgatgaaaaggacgtgtcaaaatgaaacaagagacaccgataacactccatgtgaagtctgtgatcgaggatgacggaaatgaggaagtcatcgaattccgtactaccggattttactatgtaaaacaacaaaaagtgtatctatcttattatgaagaacacgacctgggcaaagtaaaaacgattgtgaaggtgagcgaaggcgaagtcctgatcatgaggtcaggcgctgttaaaatgaatcagcgtttcataacgggagcttccacaattgcgaaatataaaatgtcatttggtgagcttgagctgcaaacaagcacaaaatcgattcaatctgatctcggtgaagaaaaaggccgaatcagcatcgcatatgacatgcatgtcggagacgagcagcagcatttacataatatgacgatcacgtatgagggaggaactcacgcatgaacattgcggaacaaatgaaggacgtgctgaaggaagagatcaaagcggccgttctgaaagcgggcctggcggacgaaagccagattccaagcgtactgttagaaacgccgaaagaaaaaacacacggtgattattccacaaatatggcgatgcagctggcgagaatcgcaaaaaaagcgccgcgtcaaatcgctgaggagatcgtggcgtcatttgataaaggcaaagcttccattgaaaagatggatattgcgggacccggctttatcaacttttacatgaacaacagctacttaacaaaactgattccgtccgtgcttgaagcgggtgaacattacggagagacaaacatcggacaaggcgaaaagattcaggtcgaattcgtatcggccaacccgacgggagatcttcacttaggccatgcgcgcggcgcggcggtaggtgacgcgctgtgcagcgtgctttctaaagcgggctatgatgtgagccgcgaatactatattaatgatgcgggcaaccagattaacaacctggcgctttccgttgaagtccgttattttgaagcgctcggtctcgagaaaccgatgccggaagacggctaccgcggcgaggatattatcgccatcgggaaaaagcttgccgaagatttcggcgaccgtttcgtacatgaagaggagagcgaacgtcaggcgtttttccgtgaatacggcttaaagtacgagcttgataaacttcgctccgacctggaaaatttccgcgtgccgtttgacgtatggtattctgaaacgtcactgtacgaaaacggaaaaattgatcaggcgctcgaggcgcttcgcgaaaagggccatgtatacgaagaggacggcgcgacatggttccgttccacaacgttcggcgacgataaagaccgtgtgctgatcaaaaaagacggctcatacacttatttgctgccggatatcgcataccataaagacaaacttgaccgcggattcgacaagctcatcaatgtatggggcgcggatcaccacgggtatattccgcgtatgaaagcggcaattgaagcgctcggttacaagaaaggcacattggaagttgagatcattcagctcgttcatttatacaaaaacggcgaaaaaatgaagatgagcaaacgtacggggaaagccgtaacgatgcgcgacctgattgaagaggtcggccttgacgcggtccgttatttcttcgcgatgcgcagtgctgatacgcacatggattttgacttggatcttgccgtatccacatctaacgaaaaccctgtgtattatgcgcaatacgcacatgcacgtatttgcagcatgcttcgccaaggggaggagcagggacttaaaccggcggcagatcttgatttcagccatattcaatcagaaaaagaatatgacctgctgaaaacgatcggcggcttccctgaggcagtggcagaagcggcggaaaaacgcattcctcaccgtgtcacaaactatatttatgatctggcttccgctctgcacagcttctacaatgcggagaaagtcatcgatccggaaaataaagagaagagccgcgcgcgtctcgctttaatgaaggcgacgcaaattacgctgaacaatgcgcttcagctgatcggcgtatccgctccggaaaaaatgtaatgatgatcaaaggacaaagtcttcgggctttgttctttttttgtatataaagcgtgtgatgtaattcacaatcccgcacactgagtttttgtatgataagactgatattgaatcagtgaaaggggcaagccgaatgatcaatcgtcaacatattcaattatcgttgcagtcattaagcttagtggcagggtttatggtgtgggtgctgatttcatcgctcatttctcaaatgacatcagatattcatttaagcaaaggcgagatttcattggtgacggcgattcccgttattctcggatcgcttctccgtattcctttaggatatttaacgaacagatatggcgcgcggctgatgtttatgatcagcttcatcctgcttttgtttcctgtattttggatcagtatcgcggattctttatttgatttaatcgcgggcggctttttcttagggatcgggggagcggtattctccatcggagtgacgtccctcccgaaatattatccgaaagaaaagcacggtgtcgtcaatgggatttacggtgccggaaacatcggaactgccgttactacctttgcggcgccggttatcgctcaagccgcgggatggaaagcaaccgtgcagatgtatcttgttttgctggctgttttcgcattactgcacgttttgttcggcgaccggcatgagaagaaagtcaaagtttccataaagacacaaatgaaagccgtttaccgaaatcatgtgctgtggatgttgagcctgttttattttattacgttcggcgcctttgtcgcctttaccatctatcttccgaattttttggttgagcattttgggctgagccctgcggacgccggtctgcggacggccggctttattgcggtctctacactgctcaggcctgtgggagggtttcttgcagataaactgagcccgctccgtattctgatgttcgttttcgcagggcttacgctgtcaggcgtcatgctgtcattctccccgacgatcggtctttatgcgtttggatcgctgacggtggcagtctgctcagggattggaaacgggactgtatttaaactggtgcctttctacttttcgaagcaagcggggattgccaacggtattgtgtcagctatgggcggactgggcggttttttccctccgctgattctggcaagtgtatttcaggcaacaggccaatacgcgatcgggtttatggcgctttcagaggtcgcgttagccagctttgtccttgtgatctggatgtattggcaggaaaaaatgaaaacacatacggagagaaacagtcagagcctcaattcataatgatccattcacaagattgttagttttttctgggtgagtgcaaatcaagtcacgttacaatatacatacgcaacgtgactttcttcgaggtgagctcatgaatattctctctgtccgaaaatctgataaagaacttctttcccgcgaactgcatgaattgctggaatcgatcagtacgaaaaggaaaatgaaaaaacacacgtatttgtttcaagaaggaatggatgcaaaagagctttatctgattcaatcaggactcattgaaatcggcaagctgacgtctgacggaaaagatctgacgcttagaatctgccaaaaaaacgatattgtcggggaattgacgctattcacagatgagccgagatatatgctcagtgcgaaagtgttagaggatggcgaggtgctcgtcattaataaaaacaagctggaaaaggaattgatccaaaacggtgttttgacgtttgaatttatgaaatggatgagcacccatcttcgaaaaatccagtccaagatcagggacctgcttcttcacggcaaaaagggggcgctctattccacccttatccgcttatcaaacagctacggggtggatcgaagcgacgggattctgattaacattgtgctgacaaatcaggatttggctaagttttgcgcggcggcaagggagagcgtcaaccgcatgctgggagacctccgcaaacaaggggttatttcgatagacgaaaccggaaaaattattttgcacaagcgggactatttacggtgtgagatcgagtgtgaaaattgtccgcttgagatctgcaatattgactgaaaaaaacaaggacagcggtgtccttgtttttttaccttgtgataaacaggcacatgacggcaagaaagaagccggcatttacgatttccagaatgccgatcgttttcaccggccagtctcttccgtgaaaaaaccaggcccgcagactgcttgggataaaagcgagaaacgcccagcctgccccgagaagagccgataaaaaggggagcaagaggtgatatccccacgaccagtatgcaaaggttctgttttttctctcccggatgaccgatttcacataaaaagaactcccgacaaaaaataaagcggattgcaagaatagaaaccaggcccagccgtcaagggttcccgttcccagccagcagctcgcaagcccgcctgaacaaaagaacagaacacctgcaatatcattcgtgagcgcccgttcgttttttcggcgggcataatgcgtatgtatgagaaacagcggcaataaaaaaacgccgatccagacgagctgcggcttatgaaagacagaaatgatcaaaaagcagcaggccggaaaaccgtaataccatatccacttttgatagagctgaagctgtttctttttcaaagcgagcgaaacgggataaaccgttaagaaaggaacagccagcccaaaaagagcggaatatgccagaaaaccgggcctcccttgaccatgccgagtaaaaatggaatcagcagcatcgcccatgcgccgtgctgcttcggaatcatcgccttcatcgaaaccctcctttttatttcattataagtgcaaacactctcctgataagtgacttttatcatacaagctgtgaaatacatcactgccgtgcaggctcaatcgggctacactaaagctatccttagcacaggaggctttcctatgaatcagtgtgactatttattatttctgaaacaacttcctatgtttaatgaagtgcctctgtccattgtcgaaaccttgctgaaaaacgggacgtttatccgcggctcatctgaccaatctccatcctttcttcattcacaatccgtttatattgtattaaaaggcaatatccgttttacggacagcaggctccctgaaggatcgcaaaccgttgcgctgtgggaaaaaggcgatgtgtttccgattgatgaaaaaggcgggctctctttatcgccttttatctcagtcaatgcctcaccggatattctggtactccatattccatattccgtaattaagcaaatgatgtcttaccatccgcggctgcaaatgaactttttggcgatgcttcagcaaaatgtcttctgttcctatcaattgtttttgcggtacctgcatacatcacgggatgaaaacgccgaacccggttcttaaacagaaccggtttttttgatgacgccgggcgtccccatatcgtttgaaaatccttcctgctgctttgtgtgaacgttttgtgaaaaaagcagagtgtgtgacatagttcacaaggtgatgcgccgtctctgtttatagtgtacatagcattacctgactcggaaggagtgaacgatcatgaagaaaaagaaaatgagtccgttgctcaggagattaaactatttttctcctatcgaacatcattcaaataaccatagccaaacgacaagcgaagatcgtgattgggagaatgtatacagaaacagatggcagtacgacaaagtcgttcgctccacccacggcgtcaactgtacgggttcttgcagctggaatatttatgtgaaaaacggaattgtcacgtgggaaggacaaaacttgaattatccatcaacaggcccggatatgcctgatttcgaaccgagaggctgtccgcggggggccagtttttcttggtacatctacagcccgctccgtgtgaaatatccatatgtccgcggtgtgctgatcaatttgtggcgggaagcgttgcaggcgcatcaaaatccgctggatgcctggaaatcgatcgtcgaaaaccctgaaaaagcgaagtcctataaacaggcaagggggaaaggcggctttgtccgcgcggaatggccggaggtgctgaagctgatttcagcctctctgctgtatacagtgatgaaatacgggcctgaccggaatgtcggtttttctccgatcccggcgatgtccatgatcagccacgcatcaggttcgcgattcatgtcgttaatcggcggcccaatgctcagtttttatgactggtatgcggatcttccgccggcgtccccgcaaatttggggcgaccagacggacgttccggagagcagtgattggtacaattcaggctatatcatcacatggggctccaacgttccgttaacgagaacgcctgatgcgcattttctggcggaagcccgctataaaggcgccaaggtcatttcaatcagcccggattttgcggaatcctcaaagtttgcggatgactggctgagtatccgccaggggactgacggggcgcttgcgatggcgatgggtcacgtcattttgcaggaattttacgtgaaccaagaaactgaacgttttattgagtacgcgaagcaatacaccgattttccattcttcgtcactctgtcaaaagaaaacggcgtgtatacagccgggcggtttctgcatgcaaaagacatcgggcggcagacaaaaaatgatcagtggaagccggcggtctggaatgaacagacaggtgcgtttgccataccgcaaggaacaatgggctcccgctgggacgggcagcagaaatggaatctgcacatgatcgacgaagacaccggggaacagattgagccccgtctctccgtgctcggaatagaggacgaaatcggcatggtgcgcattccgtatttttcaaatgacggaaacaaagtgctggagcggaatcttcctattaaaaaattggatctgaatggtgaggagacgtacgtcacgaccgtgtttgacttgatattggccaactacggcgtgaaccggggcatcggcggacaatcagccgcatcttatgatgatccccgtccgttcacacctgcctggcaggaacagatcacgggaattaaaagagaagccgttatacagattgccagggagtttgcccaaaatgcgatcgatacagacggcagatccatgattatcgtaggggccggcattaaccactggttcaactccgacacgatttaccgtgcggtgttaaatcttgttttactcgtaggcgcccaaggcgtaaacggcggaggctgggctcattatgtcggtcaggaaaagctccgtcccgctgaagggtggcagacgattgcaaccgcaaaggactgggaaggcgtgcctaaactgcaaaacggcacctcgtttttctactttgcgacagaccagtggcgttatgaagaccagccgatcagtgacttggcttcaccgatcgccgcgtcatcccgctacaagcatcacgccgattacaatgtgctggcggcgcgattagggtggcttccgtcttacccgacattcaatcaaaacggcattgatctgtacaaagaagctgagaaggcgggggcggcgacacctgaagacgtaggtgcgtacgtggcctcacggcttcaagagaaaaaactgaaattcgcgattgaagacccagacaatgaagtgaatttcccaaggaatctcttcgtatggcgggcaaatctgatctcaagctcaggaaaagggcatgaatactttcttaagcatctgctggggacgacgaacggtttgatgaatgacgacagcgacagcattcgccctgaagaaatcaaatggagggagcaggcaccggaaggaaagctcgacttgttaatcaacctcgattttcgaatggcgggtacggcgctgtattccgatatcgtgctgccggcggcgacatggtatgaaaaacacgatctcagcagcacggatatgcatccgtttattcatccatttgctccggccatctcggcgccgtgggaatcgaagtcagactgggatattttcaaggcgctgtcaaaagccgtttccgatctggcggaagaagtcgatatggagccggtgaaagaggtagtcgccacgccgctcctccacgacacgatgcaggaattggcccagccgttcggcaaaatcaatgactggagcaagggtgaatgtgaagccattccgggaaaaacgatgccgaacatccatgtcgttgaacgggattacaaacacatttttcataaaatgaccgcgcttggtcctcatacggctttaaaaccgagcggaacaaaagggatgagctggtcgattgcggatgaatatgaatcactcaaacagagactgggagaaaccgattcaaacagcgttgccaaaggatgtccgaatataagtgaagcgaagcaggcggcggaagcgattttaaccctgtcgtccacctccaatggaaaagtcgccgtgaaagcatgggaatcgcttgaaaacatcacaaacctgaagctgaaagacctggcggaagagcgcgaggaagaatgctttacgttcgagcaaattacagcccagccgaaaacggtcatcacctctccggcctttaccggctcagaaaaaggagggcgaaggtattcgccgtttacgacgaatgtggaaaaattaattccgtggcggacgctgacaggcagacaatcctattatgtcgatcatgaactgatgatggaattcggtgaaacgatggcgacatttaaaccgatcctccagcaccgtccgttcctaagcaagcggcctgatcaagagggcaaagagatcgttcttaattatttgacgccgcataataaatggtccgtccacagcatgtattttgattctctgccgatgctgacgctgttccgcggcgggccgaccgtgtggatgaataaagatgatgctgcggatacggatatcaaagacaacgattggattgaatgcttcaaccgaaacggcgttgtcgtcgcgagagcggttttgtctcatcggattcctaaaggaatggcgtttatgcatcatgcccaggaccgccacatcaatgtgcccggcacaaaactgacgaataaccgcggaggcacccataacagcccgacaaggatccacgtcaagccgacccagatgatcgggggctatgcccagctcagctacggctttaactattacggtccgacggggaatcagcgcgatctgaatgtcgtcatccgcaagctgaaggaggtcgattggcttgaagattaaagcgcaaatcgggatggtcatgaacttggataaatgcatcggctgccacacgtgcagcgtcacctgcaaaaacacgtggacaaaccgttccggtgcggaatatatgtacttcaataatgtagaaacaaagcctggcatcggctacccgaagcaatgggaggatcaggacaaatataaaggcggctggacgttgaaaaaaggaaagcttgaactgaagtcaggcccgaaaacaaaccggcttgcaggccttttctataacccgaaccagccgacgattgatgactactatgaaccttggaactatgattatgaaacgttaacaaacagcccgcagaaaaaacaccagccggtggcgcgcccgaaatcgtccttaacgggggatttcatgaatatcgaatggggcccgaactgggaagatgatctcgcgggcggccatattacagggcttgaagatccaaacgttcaaaaaatggaggaatccattaaaacggaattcgatgaggtctttatgatgtatctgccgcgtatttgcgaacactgcatcaatccggcgtgcgtgtcatcctgtccttccggcgccatgtacaaacgcgatgaagacggcattgtgcttgtggatcaaaacgcatgccgttcatggaggtattgcgtgtcatcctgtccttataaaaaagtctattttaactggcaaacgaacaaagcggaaaaatgcacactctgcttcccgcgattggaggcggggctgccgactatctgctctgaaacgtgtgtgggcagaatccgctatctcggcgtcatgctgtatgacgcggacaaagtggaggaagcggcatcggttgaaaatgaaaaggatctctaccattcccaactggacgtttttcttgatccgaatgatcctgagattgccaaactggcaaaagaacaaggcatcccggctgaatggatagaggctgcgcagcgatcgccgatctataaaatgatcattgactggaagattgcgcttccgcttcaccctgagtaccgtacgctgccgatggtttggtacattccgccgctcagcccgattatgaatctctttgaaggaaaaggcagccggcaaacggcggaagcgatttttccggctatcgaccaaatgagaattccgattgactatttggcgcagttattaacggcgggggatacggatcatattcggtccacgttaaagaaaatgtctgtcatgcgccagtatatgagggcggttcagacgaataaatccatcgacccggcattggtctccagtgtcggcttaacagaacagcaaattgaagacatgtaccggctgctggcgatcgccaaatatgatgaccgctttgtgatcccgagcagccatcgtgaagaagtgtctgatttatacgctgaacaagggagctgcggcttatcattttcaggcggcccgggctcttgtttctaatttttcataaatgaggtgtaataacatgaacaccacagaccggcaaatgacgttctccgctctttccgttcttctctcatatccggatgaagagtggagagccgggcttcccgattggaaggctcttatccatgacatcaccaatcagcaaatccgggagaaattgctgcactttttagaggcggcagccggcttttctccggaagcgctgattgaacactatgtgtatacgttcgattttgggaaaaaaacgaatatgtacgtcacttactttaactcaggcgaacaaagggaacgcggcatcgaattgctgcatttaaaaaacacctaccagcaatccggtttcctgccgacagataaagaactgccagattacctgccgctgatgctggaattcgccgcagttgcggagattgaagcagcgagaagcgtgtttgagaaatatctttccaatgtgagggaactggcatcccgcctcgaaaaaaatgacagtatatacgctgaactgctgcacgtgctgctggccgcgcttgaaaacatcggtgtacgtgaaagcactgaagaaggggctgttcaggcatgaacggacagatcctctggggtattatgccatacattgtattgacgatctttatcggcgggcatatttaccgctatcagcatgaccaattcggctggacggcgaaatcaagcgagctgttagaaaagaaaaaactcgccgctggcagcacactttttcattggggactgctatgcgttgtcggcggacatgtcatgggaattttgatcccggaaggcgtgtatgcttctcttggcatttccgagcatatgtatcacaaaatggcgattggcgcaggcctgccggcggggatcgcggcatgtaccggacttgtcatcctgacgtacagaaggctgtttgacaaaagaatccgcaaaaccagctcgccatcggatatcctgacgctcatcctgctgctttttatgatgctgtcgggcgttgcggccacgttcctcaacattgactcgaaaggatttgattacagggcaacagtcgggccgtggttcagggaaattgttttgttccgccctgacgcttctttgatggaaagtgtcccgctatggtttaagtttcatatcatcatagggtacgtcgtttttatcctttggccgtttacaagattggttcacgtgttcagcctgcccctcaagtatttgacccgcagctatgttgtctatcggaaacgcacgtgaaaatcccccctgcaagagggggattttttatggtgaaaaaataaaaacataagatattttctgccaaggtaatggctggtaagcggggattcatgttatgttttatttggaaataacatcaacgaaaggagagtgaagaatgaagcggattttcctcattttagccgcctgtctgatgacaagcgccggcgtcctgacactcagacattctcatgtattaaccggcggcacagcgggactgtcactaagcctgtcatacgtgtttcattcctcgtttgcgattatcttctttctgattaatatcccgttttatatattttctctcatcagaatgggaatcaaattcactctatccaccgtttttgcagtcacagtgctgactctgtttaccggcgcggatcactggctgccgccggtctctgtttcaccgcttgccggggcgatttgcggcggggcgctgatcgggttgggcttgtcgctcatgttttatcatcaggcatcgctcggcggcgccaatatcctcgctttatttctgcaaaagcgctgcggatggaatccgggtgccgttaatttcctcttcgattttggcgtcgtgctggccggcattttctccgtcggattgctgaaagggctcttctccttagtgtcgatagcggtcaccggtctgatcatcggcatcttcaaaaataaaatcaaaggcagctgctcgctcaatccggcattgcttcagaacatcacacccggccaatcacaagaagcttcatcataagcctttccgctcgtgcggagaggctttttcatatgtttacaagccggaaaacagagggtatacagagatatcggatcagatgggagagagtcgggatgctgaaaaggagactggaattttgctttttatatatgatgcttatcggagcatatgtcatatggttttttccggtttccaggcttgagttttacggaggggtgctttgctatgcaagcattattttgttcagcatctattcgttaattcttgaaaaccgcacctcgcagcacacgttgttatggattcatattcttgtgttttttccgatcgccgggtacttattttaccttttttccggccagctttatgaaaaaggcaagctgttcaggtcgaaacggacatacaaccgggaaaagctgagaacgatatttgatatggaacagacacccgatctgaccgagctgaaaggaaatcagaagcgtttctttcaatattcaatcaaggcgtcccatatgaatatcaatacaaaaagcaggctgaaggtgctcaaaaacggggacgaaacatttcctgagctgtttgaggcgctccgggaggccgcgtcatttatacatattgagtattacatgttcaaatcagacatgctcgggcacaagatgatggacattatgatggaaaaggcgcgtcaaggcgtggaagtgcggtttttgttcgacgcggccggcagcctgaagctggccggaaaagatattaaaaaactgaaacgcgcgggcgtgaacatcgtcccgtttctgccgctgaaatacggttttttcaaccaaaaattcaatttcagaaatcaccgcaagatcgtcatcgttgacgggaaaaccggttttgtcggcgggctgaatgtcggcaaggagtatatcggcaaagaccaagatgtcggcttttggcgggacacccatatgaaagtcgaaggagaaatcgttcagacgctccacagcatttttatgcttgattgggaatacgtttcggatgaggtgctgattgatcagaaagcatacagccgcccggtccctgcagaaagcggcggcgtctatcaagtcgttccgacaggccccgatatgaaggagcggatgagcgatctgtattacgccatgatagcggcggccgaatcgtctgtatggatcgcgacgccttatttcgtgccgaatgagccgatccgcacagcgctaaaggaggctgctgccagaggcgtccgggtgcgtgtcatggtgccggaaaccaatgacgggtttttaacccagtacgcgacgagatcgtatttccccgagcttcttcgcgaaggaatcgaagtctattcctatcaaaaaggctttatgcatcaaaaggtgctcatcactgacggaaacctcgcctctgtcgggacagcgaatatggacatgagaagttttcagctgaactttgaagtcaatgtcttttttacagatcaagaggcgatcaaagatcttgaagcgcattatctggaggatatgaaggagtctgaaaaaatcagccccgtccgtttctataaacgcacattatgggaaagaacgaaggaatccttcgcacggttattttccggcgttttataaaaaacgcttttaaaactccttgtgtatagtataattgagaaatattatcattaagaacgaggcacaaggaggacggaatcgtgctgcgacaatttttttcttattataaaccgtacaaaaagctgttttttctcgacttcttttctgccatcgccggcggattgatggagctgagttttcctctgattgtcaattactttatcgatacattgctcccggggcgggattggagtctgattattttgacttcagcggctttattcggggtctacgccctcagctcggcgcttcagtatgttgtgacgtattggggccatatgctcggcattaacattgaaaccgatatgcggaaaaagcttttcgaccatctgcaaaagctttcgttcaaattttacgataacaacaaaactggcagtttaatgtccaagctcaccaatgatttgatgtatatcggagaaaccgcccatcacggacctgaagacctgtttatcgcgattatgacgattttgggcgcgttcggtgtgatgctgtttattaactggcagcttgcgctgttgacttttatcattatgccggtcgtcatttggcttgctttgtattttaataaaaaaatgacctctgcgtttacaaaactgaacaaagacgtcggggacttcagcgcgagggttgaaaacaatatcggcggcatccgtcttgttcaggctttcagcaatgaagcgtttgaaatgaagcggtttgacgtgaacaatcagcgtttccgcaaaacaaagctgacgtcatataaaatcatggcgaaaaacggctcgatcagttacatgctgacaagattcgtcacgctgttcgtcctgttgtgcgggacatggttcgtgatccgcggatcgctatcttacggggaattcgtcgcttttgtgctgctgacgaacgttctgttccgtccgattgataaaatcaacgcgattattgagatgtatccgagaggcattgccggttttaaaagctttatagaaatactggaaacggagcctgatatcaaggacgccccgaacgcgagacatgtgtccggtttaaaagggaatatccgttatgatcgtgtgtcattcggttacgaagaaaacagtccggttctgtcgggaatcaatttgtccattcatgccggggagacagtcgcattcgtcgggccttcgggagcgggaaaatcaacgctgacaagtctgctgccgcgcttttatgagccgtctgaaggcgtgatttccatcgacggaatcgatattaaggacatgacgctgtcatctctgcgcggacaaatcggcgtcgtccagcaggatgtctttctgttttccggcacattgcgggaaaacattgcttacgggcggctcgatgcgtctgaggaagaaatctggcaggccgtccgccaggcgcatttagaggatttggtaaacgggtatcccgacggtttaaacacggtgatcggcgagcgcggcgtgaagctgtcaggcgggcagaagcagcggctttccatcgccagaatgtttttgaaaaacccgtcgatcttaattttagacgaggctacatcagccctcgatacagaaacagaagccgccattcaaaaatcgctgcaagagctgtctgaaggacgcacaacgcttgtgatcgcccatcggctggctacgattaaggatgcggaccggatcgtcgtcgtcacgaaagaaggcattgctgaacaaggtcatcataaggaactgctggcatccggcggcatgtaccagagactccatcaggcccaattcggcgagctgatacatcaataaaagaaaaaggatagacaaaaggggccgggcagcctcctgtctatcctttttttatgtagtccgtatttaatgggcttctttttgcgcaggttcgatgatatgtttgaaacggtcaacaagctgcaccgctttctttccttccactacaattaaatattcttgttctttatgggccattctgaacgtttccagctcaatgatatctttgattttgcacatcgtttttttagagtagatatacagctcgtggcctcccgtgtggcaaagctgataaagctgaagcatgtttcgcaaagtgaacttcttagcggctattttcaaagatgtaatgtttttcatatgttttctcctccgtctgatggtctgttatttcggaaattccccatataaacgggtgataaacctggttatgccttccacttcagcactccgcccgccaggcgtttgactccgcggatggcgcttaattcttcgacgagccgtagcagcgcccggtctttctctttcgcctcaatcataaagtcgatgtccgtatcccattgtctgaaccgctccagcaccggcagaataaaattcgcatccacatagtccgcatgactgcgtacggctgattctgattttggcgaggagagatggaccttcggctttaagccgatccgctgccatgttttgatcatccgcggaagaatgtcatctaaatcagcgtcatcggtcggattggcgtaaaaatggtgataatcaaacacaaacggaatgccttcttgctcacatacactgagtgtttcctcggacgtatatgttttatcatcgttttctaaagtcatccgctgtttgatgacatcgggaagttctttcagattcacgcggaaacggccaagcgcgctttgtttgtcaccgtaagcgcctccgacatggatgttgatgacggaacggtccgcgatgcccattgcgtccagcatgtcataatgataggccatatccttgaccgcatttgcggtgatctcctgtttcgggcttgtaaaaagcgtgaattggttcggatgaaagctcgttctgaggtcatattttctgaccagcccgccgatctcacggaactcctggcgaaacggcgtgacaaaatcccacagcacatccggatgggtggccagcggcacaatcgagcttgagaacctgtacagcgggatgccgtgtccgatcacataatggatcgtgcgcagcgtattggtaagattggctttcgtcacagaaagcagggcctctttccgctcactgcgggaaagcttggtatagcgcgcatatgttaaggtttttgcgggggacgcgtcccaaaggcacatggcgtttgcgacgaatccgaatctgaacagcatatggtttctcctttataaaaagtaagatatggcctttcccagccattctgcaggaagctgtctgacggagcgctgtttcactttttctaatgtgagaagctcggatttttcgatgtcctgctttatggttgaaagcacttcctttgtaaaggcttcatcatgaatgatgacattcacctcttcattccagaacaggctccgtttatcaaaattcggcgtgccgataatgctgatgcggtcatctataatgaaggctttgacatgataaaagccttgataataccgatagatgaggcagccggccttcagaagctcgggataataggtaaaagctgtttcccgaacgagcgggtggtctgatttcatcggaacgatcaagatgactttgacgccttttcggcaggctgaaataagcgcttcctgaagctttttgctcggtacataataaggcgtgccgataatgatttttttttccgccttacggatgcagttttcataatgcgattcaagcgaaaacccgtcagatgcatatgtcctatgagagatattcccttcggataatgccggataaaccccgggtgatccgggtgcttttccggtgtttcgtttcagatcgcttacaaaaagagtctgaagatccgccgtgccttcgccggtcatccgcaggtgataatcctcccagtttccgaacttcgcttttttgccgaggtactcttcagcgatattaaaaccgccgacatacccgattttgccgtcaatgacggtcactttccggtgattccgtttttgcagcctgaaaaaaagaaacggaaatgccggtttatttagaaaatgaacgtgaacgccggcttttttcatcgtttgaatggaaggctttttcacttggcggctgcccgcccaatcgagcagcagatatacggagacgccggcttgggccttttctttcaataaatcaaacatctcatggctgacttggtcgttcttcataataaaaaacatcatatgaatagaagagacggcttggcggatatcaaccgtcatctgccgcacaagctcgctgccgcagtgaatgagtgtgatatcactctttttcgggtcaaaaacgggctcatacgcctgttttttgtacgccgcccggccaagcagcatatcaagcagtataagtgcgatcaatatgataaaaatgacaagcaacacaaaaatgaccttcataccgacgctcctttccgaagtattcgtagtgtgccctgagaatgtgaatttaattattgactgaacactcattcattatttatgataaagtaaagatatgacaatgaagaggggtatcagaacaaagggggagacaagatgaacgcatttctcatggtaaacgcgctgctgttttcagctgtaaccgcttacgccgtttatttattcgtttacctgatcagaacgaggatcgcttatattaagctcggccaaagggaagaatttgataaacgcctgaaagaacgtcttcagaagatatgggtgaatgtgttcggacagaaaaaactgctgaaagataaaaagagcggaatcatccacgttctgtttttttacggttttatactcgttcagttcggcgcaattgattttattctgaaagggctgcttcctgaccgccatctgccgttcggtccgctttatccggcgtttaccttttttcaggaaatcgtcacgtttttgattttaatcgccgtagtctgggcgttttaccggcgctacattgaaaaactcgtcagactgaaacgcgggtttaaagcggggcttgtcctgctgtttatcggcggactgatggtgacagtgcttctcgggaacgccatgaaccttttatggcacgatcattctctgtcttggacggaaccgatcgcttcctccattgcgtttgtgctcggcggtctttcagcgccggcggccgccgccgtgttttatgtttcatggtggcttcatctgttgtttttgctcagctttttagtgtacgtgccgcaatcaaagcatgcgcacttaattgcgggtccggcgaatgtgttcctcagcaggctggattcaaaaggaaagctggaaaaaatcgatttcaccgatgagacgaaagaaagctacggcgtcggaaagattgaagacttccgccgctctcagcttgtcgacctatacgcctgcgtcgaatgcggccgctgtacaaatatgtgtccggcctccggtacgggcaagatgctctcgccgatggacctcattttaaagctcagagaccatttgacggagaaaggcgctgccgtgacgtcaaaatctccgtgggtgcccgcgcccgtttttcagcacacgaaggcgaatcagctcgccgcggcttcctcagggggaggatcgcgtgaagcggcggcagccattgattacaacccgagcttaatcggcgaggtcatcacggaagaggagatttgggcatgcaccacttgccgcaactgtgaagatcaatgtccggtcatgaatgaacacgttgataaaattatcgatctgcgccgctatcttgtgcttacggaagggaagatggacagcgacgcgcagcgggccatgacaagcattgaaagacagggaaacccgtggggcttaaaccggaaagagcgggagaactggcgggagcaggccgatacagagattccgacagtgaaagaaatgaaaaaacaagacaaagagttcgactacttattttgggtcggctcaatgggttcctacgataacaggagccaaaagattgccgtctcatttgcaaagctgcttaatgaagcgggcgtatcctttgcgattctcggcaataaggaaaaaaactcaggcgacacgccgcgccgtttgggcaacgagtttctgttccaagagctggcggaacacaacatcggcgaatttgaaaaacacgggatcaaaaaaatcgtcacgattgatccgcacgcctataatatgttcaaaaatgaatatcctgatttcggattccgggccgaagtctatcatcatactgaattattagccgagcttgtgtcacaggggagactaaaaccgcttcacccggtgaatgaaacgattaccttccatgactcgtgctatttaggaagatacaatgaagtgtatgagccgccgagagcgatcttaaaagccattccgggcgttcaattgaaggaaatggagcgcagccgcgaaaatgggatgtgctgcggcgccgggggagggctcatgtggatggaagaagaaacgggagcgagaatcaacacggcccggactgagcaggcgctttctgtcagtccgacggtcatcagctccggatgtccttactgtctgaccatgctcggtgacggtacgaaagcgaaagaagccgaagacgcggtcggcacttatgatgtcagtgaattgctcgccatgtctgtattcggcgctgaaaaacaagagtctttatagaaagaagcgggccgccggcgcatatgccggtggctttgttttcgcacatcagccgatttatgacgggacggctctaaaatttcttaaattacgctgttaagggtagcatattctgttttaatttgtttataatgagaggtatggtttatgaacaaaacaatacaaattcgttcttattataggatagaaacagatacatataagtaatagaaagggagtgtccgaccttgagtatcaaacaatattctcaggaacagctgaagcagatggctttagttgaaatcgctcacgaaattttctcagaacataaaaaaccggttccgttccaggagctgctgaatgaaatgatctccttgctcggtgttacgaaagaggaactgggcgaccgtatcgcccaattttatacagacctgaacattgacggccgctttattgctctgtcagaccagacgtgggggcttcgcagctggtatccgtacgatcagctggacgaagaaacacagccgactgtaaaagcgaaaaagaaaaaagcgaaaaaagtcgttgaggaagatctcgaccttgatgaattcgaggaagttgatgaagatgacatcgatctcgatgaaatagaagaagatattgaccttgacgcagacagctttgacgacgaagatatcgatgaagaagatgacgacgagcttgagatcgaagacgatgtgattgaagaagatgaggaagattatgatgatgaggaagaggaacgcaaagactgattttatatcagcaaaacgatcttgactttcattgtcgaactatgtagtatgtattttgggctcttcaaaaagaagagaattcataagagtgctacgctccctttcaagaaattgaaagggagctttcttattttcatctcccaaattcttttacacatcatttgtttttagtgaaatgattttctataaaacggcacattttaaggaatgtagcgcagaccgaagagaggagcaaacgaaatgacgaaatatatttttgtaaccgggggagttgtatcatcactcggaaaaggaattgtggctgcgtcacttggccgccttttgaaaaacagaggcatgagcgtcactatccaaaaatttgacccttatatcaacgttgacccgggaacgatgagcccgtaccagcacggtgaggtattcgttaccgatgacggcgctgagactgaccttgacttagggcattatgagcgtttcattgacattaatctgaacagattcagcaacgtgacgaccggtaaaatttattccgccgtattgaaaaaagagcgccgcggggactacctcggcggaacggttcaggtcattccgcatatcacaaatgaactgaaagaccgcgtgtaccgtgcaggcaaagaaacaaacgcagatgtagtcattactgagatcggcggaacagtgggagacatcgaatcccttccgttccttgaagccatccgtcaaatgaaaagcgacatcggccatgaaaacgtgatgtacattcactgtacgcttgttccgtacatcaaagcggcgggcgagctgaaaacaaaaccgacgcagcacagcgtaaaagagctgagaagcctcggtattcagcctaatatcatcgtcgtgcgcacggaaatgccgatttctcaagatatgaaagataaaatcgcactcttctgcgatattgacacgaaagcggtcatcgagtgcgaagatgcggacaacctttactccatcccgcttaaccttcaggagcagggactcgataagcttgtctgcgatcatatgaaattagaatgcaaagacccggatatgacggaatggaaagaccttgtcacgaaagtgaaaaacttgtctaaaaccattacaatcagcctcgtcggtaaatacgtcgagcttcaggacgcttacatttcagtcgttgaatcactgcgccacgccggctatgcgtttgacgctgatgtgaagatcaaatggattaacgccgaagaagtgacagaaagcaatattcaagagctgactagcggcacagacggaatcatcgtgcccggcggtttcggagaccgcggcgtagaagggaaaatcatcgccgccaagtatgcgcgtgagaataaaattccgttcttcggcatctgcctcggtatgcagattgcatccattgaatatgcgcgaaacgtattaggtctggaaggggctcactctgcggagatcgatccgtccactccttatccgatcatcgaccttctgccagaacaaaaagatgtcgaggatcttggaggaacgcttcgtctcggactgtacccttgtaagctccaggaagacacgaaagccttcgaagcgtatgcggatgaagtggtatacgaacgccaccgccaccgttatgaattcaacaacgaatacagacagcaaatggaagagaacggttttgtgttctcaggaacaagccctgacggccgtcttgtggaaatcatcgagctgaaagaccatccttggtatgtcgcttgccagttccaccctgagttcaaatcaagaccgacaagacctcagcctttattcaaagactttatcggcgcttccgtacaagctgcagaacagaagtaataaaaaaagacttgcctcctttaaaagcggcaagtcttttttctgcatcaggcatattcctgcatcatttcctttaacgtaaaggacagtgcgtgatagacatacaggcctgtcattaatgaaggaaagccgtatcttgtcccgtcttcatcaggcagaagcggcatttttaatttgctgtcaatatgaacatcacaaaatgcctcaatcccggtttgatctttgatgacaggagatacgccaacgaggccgatccctttttcataaagcttttgagccagagcctgttcttcagccgtgcccggacctgaacaaaacatcagcaccctgtcgctttctgtaatcgaatcagctgtatccggaaacgctttgacggaaggcatcggttctgagccgagttccgcctcgcacaaaatgccctgcatctcatttgcgccgtataaataaatggtatgaccgctgacggctgcctgcgccagcaggcgcgcgccgtcttctattgcttcggattccttatcctgaatgcgggaaaaaatgcctgcaagctgcgtcgtaaatatctttaacatgagtgaaacctcctttacacatacaagaacagtatacaacaaaagagaaaatgctcagaaaatgtcggaaagtagactattataattaaaggaaatgtgaaaatcaaacagaatacataaacaactgcttccttttgacgaaaatgataatattggggtgtaaaatgatgaatgaaaagattttaatcgtagatgaccaatacggtatacgcatattgctcaatgaagtgtttcataaagaagggtaccagacgtttcaggccgccaacggcatacaggcgctggacatcgtaacgaaagaacggcccgatctcgtgcttttagatatgaaaatccccggcatggacggaatcgaaattctcaagcgcatgaagatgattgacgaatccatccgcgtcattatcatgaccgcttacggagaactcgatatgattaaggaatcaaaagagctcggagcgctgacccattttgcgaaaccttttgacattgatgagatcagagacgcggtgaaaaaatatttacctctaaaatcgaattaataaaattagaaacaattatgtcattgtgttgccgatttgtcgaaaagttggtatcctagagatggagaaaaagcgatctgttgttttacatatgacaggtttttatggtcatgctataggtggaaagcttttttcgagaagaagcaaatcaggctacataaggaggactttcgacatgcctttagtttcaatgacggaaatgttgaatacagctaaagaaaaaggatatgctgttggacaatttaacttaaataaccttgagttcactcaagctattttacaagcagcagaagaggaaaaatccccggttattcttggtgtttcagaaggcgcgggacgctacatgggcggcttcaaaacagtggttgccatggttaaagctcttatggaagaatacaaagtgacagttcctgtcgccattcacttagaccacggttcaagctttgaatcttgtgcgaaagcgattcatgcaggtttcacttctgtaatgatcgacgcatctcaccacccgtttgaggaaaacgtagcaactacagctaaagtggttgagcttgctcatttccacggcgtttcagttgaagctgagcttggaactgtaggcggacaggaagatgacgtgatcgctgaaggcgtaatctatgctgaccctaaagagtgtcaagaacttgtagagcgtactggcatcgactgccttgcacctgcactgggttctgttcacggtccttacaaaggcgaaccgaacctcggtttcaaagaaatggaagatatcggcaaatcaaccggccttccgttagtacttcacggcggtacaggaattccgactgccgacattaaaaaatcaatctcacttggtacggctaaaatcaacgtaaacactgaaaaccaaatttcttctgcaaaagctgtccgcgaaacattggcagctaagccgaacgaatacgatcctcgtaaatatcttggacctgctcgtgaagcgatcaaagaaacggttatcggcaaaatgcgtgagttcggttcttcaaaccaagcttaatccaatgtaacatccataaaccgcctgacagcattgacaggcggttttatgtcttacctttagaaagcgcaatcatgttttacagttctgaaaatttattactggggaggctttccttatgttatttttcattgatacagcaaacattgacgagattaaagaagcttatgaacttggcgttcttgccggagttacgacaaaccctagtttagtggcgaaagaagctgacgtgtctttccatgacagacttcgtgagattacggaagtcgtgagcggatcagtaagcgcggaagtcatttccctgaatgctgaagagatgattgaagaaggtaaagaacttgcgaaaatcgcaccgaatatcacggtgaaaatcccgatgacgtctgaagggttaaaagccgtaaaagcgctgagcgacctgaacattaaaacaaacgtaacgctcatcttcagtgccaaccaggcgcttttggcggcaagagccggagcgacttatgtatctccgttcttaggccgtctggatgatatcggccataacggtcttgaactgatttcagaaataagacagatttttgacattcatgatattgatacacaaatcatcgcagcttccatccgtcatgcgcagcacgtgactgaagccgctttacgcggtgcgcatatcggtacgatgccgcttaaagtcattcaccagctggcgaaacatccgttaacggataaaggcatcgagcaattcttggcagactggaataaataagggtgaaaagggcggcaaaccggttgcatccgtttgccgcacccttatgttttcctgtttggcagcgggccttcagtatcaaagtgaagagtgtgtttccccggaatgtgaacccggcgggcctctgtgcatcctgtgttaaaaatgccccgcaaagcttcgctattttcttcctgttattttataatgtccttgtattctttctcttcgaattggctacattttggacaagagctttatttgcagagacagaataaaatgccattttatttacgctccgcagctatcttcttatggaaggagactatcatggaaaagttgaatattgccggcggcgatccgttaaacggaaccgtacatatcagcggtgcgaaaaacagcgccgtcgcattgatacccgcaaccattctggcaaattccgaagtaacgatcgaagggcttccggagatctcagatattgaaacgctgcgtgacctgctgaaagaaatcggcggaaacgtccattttgaaaaaggagaaatggtcgtcgacccttccccgatgatcagcatgccgcttcccaacggcaaagtgaaaaaactccgtgcttcctattacttaatgggcgcgatgctgggccgcttcaagcaggcggtcatcggactgccgggcggatgccatctcgggccgcggccgattgaccagcacatcaaagggtttgaagcgcttggggcggaagtcaccaatgaacaaggcgcgatttatctgcgcgccgaaaggctgagaggcgcacggatttatttagatgtcgtcagcgtcggagcgacgatcaatatcatgcttgccgctgtactggctgaaggtaaaaccgtgatagaaaacgccgccaaggaacctgagattattgatgttgccacattgctcaccagcatgggcgcaaagatcaaaggcgcgggaaccaatgtaatcagaatcgacggcgtaaaagagctgcacggatgcaggcatacgatcattccggacagaattgaggcgggcacctttatgatcgccggcgccgcgatggggaaagaagtcattattgataatgtcataccgactcacctggagtcattaacggcgaagctcagggaaatgggttttcacattgagacgagcgacgatcagcttcttatgctcggcgggcagaagcagataaaaccggtcgacgtaaaaacgcttgtttacccgggattcccgactgatcttcagcagccgatgacatctctgttaacgagagccagcggcacgagcgtcgtaaccgacaccatctactcggcccgatttaaacatatagatgagctgagacggatgggggccaacatgaaagtggaaggcaggtcggccattatcaccggtccggctgagcttcagggcgcaaaagtaaaggcgagcgatctgcgtgcaggcgcttgtctggtcgtcgccgggctcatggctgacggcgtaaccgaaattaccggtctcgagcatttagaccgcggctacagcaatcttgagaaaaaactcgaaggtctgggcgccacaatctggcggcaaagactgacggacgaagagatagaacagctccaaaattcatagaaatgcggacttttgagaggagatcgtgttgaaatggaaagaagcttatcgatggaattggttcgagtcactgaagcggcggctttagcatctgccagatggatgggccgcgggaaaaaagatgaagctgatgatgcggcgacaagcgcaatgcgtgacgtgtttgacacggtgccgatgaaaggcacggtcgtgatcggggaaggcgagatggatgaagcgccgatgctttacatcggcgaaaagctcggaaacggatacggcccgcgcgtcgatgtcgccgtcgatcctcttgaaggcacaaacatcgtagcgagcggcggctggaatgcgctgacggtgatcgcggtcgccgaccatggaacactgctgaacgccccggatatgtatatggaaaaaatcgcggtcggtcccgaagcggtaggctgcatcgatatcgaagcgcctgtcattgataacttaaaagccgttgcgaaagcgaaaaacaaagacattgaagatgtcgtggcaaccattttaaatcgtgacagacacgaaaaaatcatctctgaattgcgtgaggcgggcgccagaatcaaactgatcaacgacggtgatgtcgcgggcgccatcaatacggcctttgaccatacgggagtagacattctcttcggttcaggcggggctcctgaaggcgtgctgtctgccgttgcgttaaaagcgctcggcggcgaaatcatcggcaggcttctgccgcaaagtgcggaagagcaggcccgctgtgagcgaatgggccttgatgtatccaaagtgctccggatggaggaccttgtgagaggggatgacgccatttttgccgcaacgggcgtcacggacggagagctgctgaaaggcgttcagttcaaaggctccgtcggtacgactgaaagtctggtcatccgtgcgaaatcaggaacggttcgattcgttgacggaagacacagcctgaagaaaaaaccaaatcttgtgatccggccataaatagagaaaagcgggacggaaagtctcgcttttcttttgcaataaagagtcaaccctatcatttatatgtcaaagcattatttaagttgaataattttttgaaatgaggtaaaaataaagagtgctgcgatttttctgtgtcattccttcttttgagtactgggaaattttcaaattctaccgcatacagacgatataaatattgatcttctcaagtttttgtcctcgcttccttcaaaactcattaagacattccttttttaaaaaaagcgccgatcatgggtggaagtgttaccgatagaagttccttaacgttttataaaagaatgtgctttggcggaatcatgcgaagcagccgatttgaatgaaaacagcaatacattgactatgaaaagcgtggtgtttttatgaaagacgtatctatttcctctttggaaaatatgaaattaaaagaactatatgaactggccagacattataaaatctcctactacagcaaactgactaaaaaagaattaatctttgccattctgaaagccaacgccgagcaggaggatcttctgtttatggaaggcgtgctcgaaatcatccaatcggaaggattcggcttcctcagaccgattaattactcgccaagctcagaagacatctacatttctgcttcccagatccgccgctttgatttaagaaacggtgacaaagtatccggcaaggtgcgtccgccgaaagaaaacgaacgctattacggacttttgcacgttgaagcggtaaatggagatgatccggaatctgcgaaagagcgcgtccattttcctgcgctgactccgctttatccggaccgccaaatggtgcttgagacgaaaccgaattatctctcaacaagaattctcgatatgatggctcccgtcggtttcggccagcgcggtctgatcgtggcgccgccgaaagccggtaaaaccatgctgttgaaagaaatcgctaacagcattacgacaaatcagcctgacgctgaattgatcgttctcttaattgatgaaagaccagaagaagtaacggatattgaacgttccgtagcgggcgatgtcgtcagctcgacattcgatgaagtgccggaaaatcacattaaggtagcggagcttgtgcttgaacgggcgatgcgtctcgttgaacacaaaaaagacgttatcattctgatggacagcattacccgcctggcacgggcctacaacctcgttatcccgccaagcggacgtacgctttccggcgggattgacccggctgcgttccatcgtccgaagcgctttttcggtgccgcgcgaaacattgaagagggcggcagcctgaccattttggcgacggcgctcgtagacacgggctcccggatggatgacgtcatctatgaagagtttaaaggaacgggcaacatggagcttcaccttgaccgttctcttgcggaaagacggattttcccggcgatcgatatccgccgctccggcacacggaaggaagagctgctcgtgccgaaagagcatcttgaccgtctatgggcgatccgcaaatcgatgtctgattctccggacttcgcagagaagtttatgagaaaaatgaaaaaaacaaaaacgaatcaggaattcttcgatttgatcaaccaagaatggaagcaggcaaacctttcatcatcagcccgccgctgataaaaaatgtatttgcaaatgcagtaaatgactgatataattctctcatatgcgttccggattactccggaataataactctgtttccacacgggattcagggcggaaggagatggatacaatgaaagcaggaattcatcctaatttcaaaaaagcaacagttaaatgcgcttgcggaaatgaatttgaaacaggctcagtaaaagaagaggtacgcgttgagatttgctctgaatgccacccattctacactggacgtcaaaaattcgcttctgctgatggtcgtgttgatcgctttaacaaaaaatacggtcttaagtaataatagattttacaggcaggcaagaattgcttcttgcctgttttttatgtccataaacagggaaaaaaggggagcggatagcctatgtacataatgaagcaaagcggatggcttgagctgatatgcggcagcatgttctctgggaaatcagaagagctgatccgcagagtgaaaagagcgacatatgcgaagcaggaggtcaaagtattcaaacctgccattgataatcgctacagtgaggaggccgtcgtttctcacaacggcacatccatgacaagccacgtcatctcgtcttcggctgaaatatgggatcatatcagtgaaagcacggacgtcatcgcggtagatgaagtgcagtttttcggcgaatcgatcatcggcgacttatcctcgcttgcggataaaggctatcgtgtcatcgcggccggacttgatatggatttccggggagagccgttcggcgtggtgccgaatctgatggcggttgccgaatcggtgacgaagctgcaggcggtctgctccgtttgcgggtcgccggcaagccgtacgcagcgtttgattgacgggaagcccgcttcctatgatgatccggtcattttagtcggcgcgtcggagtcatacgaagcgagatgcaggcatcatcacgaagtgccgaaaaaaacagactgataaataacccttttcatgaaaacatcggtaaaaaatccggtgtttttttgacgttttttcaaaaattgtagttaaataacttaaaaaagagtatgaaaaaattaagtaattttcatctcttgaattttcatttttacaggcataaaatgactaagtaatgtaaatagttatgagacattgttcgaataattgtcaaaaaaagatatagcagatcgcgatcacactagccaaaatgggtaattacttaactttgttaactatttgaagaaagaaggagattttcttgaataatattaaagtaacgaaggaaggcaacttagaaactactttaagaggaaaagaagttctatctatccctactttaaataaaggtgttgcgttttcagcagaagaaagaaaaagccttggattagacgggctgcttcctccgacaattctgtctcttgatgagcaggcaaaacgcgcatacgagcagtttcaagctcagccggaccgccttcgccaaaacgtgtatttgaatgatttgcaaaaccgtaacgaagttcttttctttaaattgcttcaaaaccatcttcgtgaaatgctgccggttgtttacacaccgactgtcggtgaagcgattcaagaatacagccatgagtacagaagacctcaagggatttacctttctatcgacaacgtggaaggaatcgaagaggcatttgaaaaccttcatgccactgccggagatattgatctgatcgttgcgacagactcagaaagcatcctcggaatcggtgactggggtgtaggcggtatcaacatcgccatcggtaaattagcggtatacacagctgctgccggtattgacccaagccgtgttattcctgtcgttcttgacgtcggtacgaacaatgaaaaacttctgaacgatcctttatacatcggtaaccgccatgaacgtatccaaggcgaacgttacgaagctttcgttgacgcttatgtaaaagctgcgcttaaatatttccctaaagctcttcttcactgggaagaccttggaaacaaaaacgcgcgcaatatcatgaagaaatacaaccatgaaattcttacattcaacgatgacattcaaggaacaggtgcgattacgcttgcaggtgtgcttgcggctatgaagaaaacaggcgcgtctattaaagaccagcgtgtggttgtcttcggtgcaggatctgccggaatcggaatcgctgaccaaatccgcgacactatggtgcttgcaggtctttctgaagaagaagccaacaaagcgttctacacaatggactacagaggcttgttaattgaaggtatggaaaacattcttgatttccaagagccgtacctgcgcacagctgaagaaattaaagattggaaacgcgatgaaaacggacaaattcctttcattgaagtgatccgtcaagcgaaaccgacaatcttaatcggtacatcaggccaaagcggcgcgttcagtgaagaaatcgtcaaagaaatggcaaaacacgttgagcgtccggtcatcatgccgatgtctaacccgacaccgcttgctgaagccgttcctagcgatcttttcaaatggactgacggcaaagtgcttgtggcgacaggaagtccgtttgacaatgtagagtacaatggcgtttctcatgaaatcggacaatctaacaacgcattcgcgttccctggacttggtctcggttcaatcgttgtagaagcgaaagtgattactcctgcaatgtttgcggcaactgctgacgcaatcgcagaaagcgttgattttgaaacaccgggtgcaggccttctgccgagcatgagcgacttacaagaagtttcaattaaagttgcgatcgccgtagcggaaactgcaattaaagaaggcgtggcaaaccgcattcctgaaaatgtagaacaagccgttcttgatgcaatgtggaaaccgcaatataagcaagttgtcgctaaataatttttacgattaattttacagtccgagggaaagcttttatgtaaaggctaaagtatacggacattaaggatttggaggagaatattttgagcttcttagatattttaatcctcctggcgccgatctttttcgtgatcgtgctgggatggttcgcaggtcgcttcggaagttatgacgcgaagtcagcaaaaggggtaagcaccttagttacgaagtacgcgcttccggcgcattttatcgcaagtattttaaccacttcaagaagtgcgtttttatcacaggttccattgatggtcgctttgatcattgggattgtcggattctttatcgtcattctgttggtttgtaaatttatcttcaagtatgatttaacgaattcatctgtattttctttaaactctgcacagccgacatttgcttttatgggtattcccgtactaggaagcttattcggagcaagcgaagtagcgattcctatcgccgttacgggtatcgtggttaacgccatccttgacccgcttgcgatcattatcgctactgtcggtgagtcatctaagaaaaaagacactgaaaacgagaacttctggaaaatgactggtaagtctattcttcacggtctttccgaaccgcttgcggctgcaccgcttatcagtatcattctggtactctgcggtgtaacactccctggcttgggagaaaaaatgcttgatcagctcggaagcacaacatcaggtgttgcgctcttcgccgtcggtgtaactgtcggtatccgcaacattaagctcagtctgccggctttcggtatcgctttgttaaaagttgccgttcagcctgcgctgatgtacttgatcgctcttgcagtcggacttccggctgaccagatcactaaagcggtattgctcgttgcattccctggatctgcggtagcggcgatgattgccacacgtttcgaaaaacaagaggaagaaactgcgtccgcgttcgtgatcagtgcgattttatctctcatctcactgccgatcatcattgcgctgactgcataatcaaaagctccctgtttcagggagcttttttgattagaattgaaatttaaaaggcgaaaatctcgttttttttctgggtttcttatgttctgaagaagcggctgtttctgagaggggagctgtctgggaaagttcctggatgcgggaggccaatgtctgcaattcggtattgaggtcgtcaatttcccgcctgtgctgaagaagctgataagacaccccttcatccgccttttgtttcagctggcgttcaagctcctctatccttgaaagcagatggttctcaccttgtttctcttttgtgagaatgtccagtttgcgctccagctctgccaatctttgttcagcgccgccattgattttcggacgctgcaaaatgaagcccgtccgttttttcggctgccggggcacttgaacgtccagaagggcagtgccttcagaaatttgccgtttgaccgatttcagcacatcaagatcctcaggtgtaaaggaataatgtccgagctcattccgttcagccggaagattcagctgcttgacccacctttgcaccgtttttgcggagacaccgagctctttcgcggccatgtttgtattcatgatcacatacctcctttttgctaggtattcgaccatgaggcggcgttcccttcatgttagacaaaacaagaaggaattcgccaaagaaagcggcatttcttcaaaaaacgttacgcttcatacaattcaagcggaagcttgtcgggatcaaagaaaaaggtaaaccgtttccccgtcagcggatcggttctgatcggttctgtgccgacgcccttttcctttaactccctgacggctgcttcaagatcgttcacggtgaaggcaagatgccggagacccgcggcttccggtctggtcggccgttcaggcggatcgggaaaggaaaacaattcaatcgcatacgcgccgtccagcgccagatcaagtttataagatccgcgatcctttcggtatgtttcttttataatgccgaaaccgagaatctcggtgtaaaaagctttcgacttttcataatcagagcatatgattgctatatggtggatggatttcagcatatccgcccctccttttttgcttcagtataacagaggcgaattgcttttgactggcgataagccctatactataatgagaatgttacgcacaggaaaacagaggtgaagaccgtgttagaccgtttacagtcaattgaacaacgatacgaaaaattaaatgagcttttaagtgatccggaagtggtcaacgatccgaaaaagcttagagaatattcgaaagagcaatctgatatacaagaaaccgttgaagtctatagacaatacagagacgcatcagaacagcttgccgatgcgaaagcgatgcttgaggaaaagcttgatgccgatatgagagaaatggtgaaggaagaaatctccgaactgcagggagagacggaaaccttatcagagcgtttgaaagtgctcctcatcccgaaagacccgaacgatgacaaaaacgtaatcatggagatccgcggagcggcgggaggagaagaagccgcgctgtttgcgggaaatctctacagaatgtactcccgttacgccgaaatccaaggatggaagactgaagtcatggaagcaaacgtgaccggaacgggcggttacaaagaaatcatctttatgattacgggaaaaggcgcatactccaagctgaagtatgaaaatggcgcgcaccgcgtacagcgtgttccggaaacggaatcaggcggccgtattcatacatccacggcgacggtggcgtgtcttcctgaagcggaagaagtagaagtggacatccacgaaaaagacatccgcgtcgatacattcgcatcaagcggaccgggcggacaaagcgtaaacacgacgatgtcggccgtacgcctgacgcatttaccgaccggtgtcgtcgtatcctgtcaggatgaaaaatctcagattaaaaacaaagaaaaagcgatgaaggtgctccgcgccagaatctatgacaaattccagcaggaagctcaggctgaatatgatcagacccgtaaatcagccgtcggttcaggcgaccgttccgagcgtatccgcacatacaatttcccgcaaaaccgtgtgacggatcaccgtatcggcctgacgattcaaaagctggatcaaatcctggaaggcaagcttgatgaagtggttgaagcgttaatcgtagaagaccagtcaagcaagctccagcaggcggaaaattaagatgaagaccgtttttgaagccctaagctgggcttcttcttatttaaccgaagcgggaagagaaaaaaacgcggccgagctgctgttgttaaatgataccggaatggatcggagcaaacttctcgcaagtctgcaggagcccgtcggcgaggacgagctttatcgattcagacggcacgtggagatgcataaagaaggtattccgattcaatatattatcgggaaagaacagttttacggcagggaattttttgtgaatgacgatgttctcattccgcgtccggaaacggaagaagtcgtctttcatctgctggacagacagaagcgggtattttccgaggcagaacgcctgaacgtcattgatatcggtacggggagcggagccattgcggtgacgctcgcgcttgaatgcggacatttttcaatatcggcttcggatatttcaaaagaagcgctgcaggtggcggaaagaaatgcgcagaacctcggagcggacgtctgttttttgcagggagatctgttaactccttttatttcatcagggaaaaaagcggatattattgtttccaatccgccgtatatttctgaagaagaaatggcggatttgtcggatatcgtccgtttccatgagccgcttcatgctcttacggacggcggtgacggtttgaaattctacaagcggtttatggaggagctgcctcttgtcatgaaagataaagcgcttgtcgtctttgaaatcggatataatcagggaaaagccgtgaaagacctgttccgtcattcctttccgaatgcggaagtggaagtcgtacaggacatcaacggaaaagacagaaccgtatccgcgatcatcacatcatgaaaaaagcccgccggtgacgcacacggcgggcttttgttacaatggaaagaaaatgaaaggggcatccgcctagaaaaaagcgttcgccttcggatgtatactcgccgccgcagcttatgcggcgggggtttgttctgccgtttggctttgacatcattttcggcgccgttacggctgttcttatcgtcacagcgatcatcgtttccgggttggccgtaagcggagcggagcagcgggccaattatcattctgaaacagaagaaggacggcacgcccgtttaaagatggccgccgttttcttttgcgccgctctcccttcagccggctgtctgctgattacgcttctgtagccggattttgtctttgcagcaatacggaatcccatacccaatagacgacggctgttaaaaccgcaaagatataaaaggctgaattagaaaacagagattggcctgacggctgcaaaagaccgaagatgatcccgtttgcaatgaatgacacccctaaataataaagaagatacagcggatgaaatctcttcggctttttattcagaaagtattgaagcggcagcgcaaaaatcaaataaggaaacaaaaaataaaacgccatcgaaatgaaagccgcgataatgaattgatgaacatacaaaatagaataaatgacagacatgcatgccgccgacagcagcacggtgtaattatatttcatctgaaaacctcctatcaaaataatatcgtaccatattttgaatctgtcaatgcagattatcagcttgctagatttttttcttcccgccggtttaaaccttttccgtcatgtccataatgggactagataaaaaaagcacggagaggaacggtggggaccgatgaaacagacaatgatgatctgcatatatatttttcttttattatcaggagcgcttgcgggtttgacaaaagaagaaacggcgcgggcatcagccaatgagcccgttgtcataccggatgaagcgatccggctcaggattttggccaacagtgataacgatgaggatcaaaagctcaagcgccagatcagagatgctgtaaacaagcaaatcacggactgggtgaaagatatcacttccattgaagaagcgcggcggctcattcgttcgaagcttcctgaaattaaagaaatcgtcaaacaaacaatgaaagaaaagggtgcgcatcaatccgtttcagttcaattcaataaaatctcgtttccgacaaagctctacggcaatatggtctatccggccggaaaatatgaagcgattttaattacactcggcaatggcgagggcgccaactggtggtgcgtcttgtttccgccgctgtgcttccttgatttctcaaacggcgaagcggtgaaagatcaggaagacggcggacagaagcaggaagaaacgcagaaacagactaaaaaagtgctggatgacgtaaaagcaaaggctgataaagcgaagaaagaaaataaagaagacgatgatacagaagtgaagtttttcctcgtcgattggatttcagatctattttcctgaagcaaaaggcataaatccggattcgattcatagattggaagaaagagttgatcgaaacggagggaaatatatgttttatcagctgagagtggcaagagatcaagatacggaggcgctggaggcctttttgaaaaaggctgatacggcacatgcggaaatcgatcagcagatcagccggtttatcgtgctggaggacagcgaaaaaaagattgccgcctgtctcgggatcgaaaaattcagcggcggaaaagggcttctccgttcactcgtcatgtcggacaggctgaatcaaagccatatcgttacactgtttcaaagtatggatgtgctgtgcaaaaaacatgagattcaagatgtctacttagtcgccaatcagccctcatctgctgagtttctgaatgtgatgggatttgaagcgtgcgccgatgcgcctgatgaactgtatacgtccgaacatttccgcaactcgttatacacagaaggttcgtttttaatggtgaaaacctctgcctgatctaacttatacacaaggttatccacttattaaaaagtgttgtccacagtttgtggataacacttgttttattaaaggacatcttttatactttcaaaaggaatacacgagagaaaataaagttttaccgctttaaaataaggagtttggttatacatgaaaacaaaaagatggtttgtggattgttcgcgcgaattatccacaaccgatccccagattacacaagccgcggaattgctccggcagaatgaggttgtggcttttccgacagaaaccgtttacggactgggcgctaacgctgaaaatacggaagccgtaacgaaaatatatgaggcgaaaggaaggccgagcgataacccgctgattgtgcatatatcccatatcagccagcttgatcgttttatcagccatattcctgatacggcgaaaaagcttatgaagctattctggccgggggcgctgacccttgtcctgccgtgtaagcccggtgtgctgtcaccccgtgtcaccgcgggacttgagacggtagcggtcagaatgcctgatcatccggtggcattagccctcatcagctcggccggactgccgatcgccgcgccgagcgccaatttatcagggaaaccgagcccgacgaaggccgagcatgtagctcatgatttaaacggccgcattgccggtattgtggacggcggcgcgacgggaatcggagtggaatcaaccgttctgtcctgtacggggaaacagcccgtgctgcttcgtccgggcggcgtgacaaaagagcagattgaatccgccgccggtccggttcttgtggataaagggctgaccgaagaagatgaggttcctatttctccgggtatgaaatatacacattacgcgccttctgcgccgatggctattgccgacggcggcgcccggagaattcaagaactggcagacgtatataaaagccggggaaaacgaatcggcattctgacaacagaagagaacgccgatagttaccaggctgattatatcaaggtctgcggcagacgcgccgaccttgaaacagtggcatccgccttatacgatgcgctccgcagctttgatgaagcggaagtggacatgattatttctgagtcctttccggataccggagtggggctcgccgtgatgaacaggctgatgaaagccgcaggcggcaccgttatccattaacttgttctaccccttatcggacatgcataagctaaacatgcgggcacgtccaagggggtttttatttcatgtcgaatctattcatcggggaacttgtctccttaagcatcatggcatttgctttggggacggatgccttttccgtcggactcggaatgggaatgattcagctgaagaaaaaacagatttttcatataggggttgtcatcgggctgtttcatgtcatgatgccgcttgtgggaatggcggccgggcatctgctgtccggttttttggggatgctcgccgtttacatcggcggatctcttcttttcattttaggggtgcagatgatcatcgccgcgtttaaacaatcagacgggccgctcatatctccggcaggctcgggactgttgctgtttgcggtcggtgtcagtctggacagcttttctgtcgggctcagtctcgggatgaacggctccaatccgtttctggccgttacgctgttcggggtcttcagcaccgttttaacatgggcgggccttttggcgggaagaaaggtgcagtcgtggctcggctcctacagcgaagcgcttggcggagccattttgatcggattcgggctgaaactgcttttaccgatataagatacgtaaaaaaagaaacgaagatgccgtttcttttttcttcatttataataggcagtaagaggtgacggacatgaaaataatctttgtatgtacaggcaatacatgccgcagtcccatggctgaggctctttttaaatccattgcagaaacgaaagggctggatgtcagcgtaagctcggccggcgtattcgcgtctccgcacggaaaagcgtcggcccatgccgtagaagcgctgtttgaaaaacggatcgctctcaatcacagttcatctcccttatcggaagaacatatcgagacggctgatctggtgctggcgatgacggaacagcataaacagctgattgaaggccggtatcaaaacagtcagggcaaagtctttaccattaaagaatacgtaacgggggaaaacggcgatatctctgacccgttcggcggtccgcttgatgtttataaacagacgcgggacgaactggaggagctgctgacccttttggctgatcaattgcttgacggaaaaagcaagtaatctgtcagaaaatctgcaaacaggtcatttgcaaaacgaatgtgaaagagtagaatgaaatcaacggatttcgtaataaaaaggacaagcacactgggctgtcttcgcccagccacacctaggaggtaaatgaatgaaagtagctattgcgtcagatcacggcggcgtccatatccgcgaagaaataaaaagtcttttggatgaattgcagattgaatacattgatatgggctgtgaatgcggcgccggctctgtcgattattcagactacgcttttccggtagcggaaaaagtggtgaacggcgaagctgacaggggaattttaatttgcggcacaggcatcggcatgagcatctccgcaaataaggtaaagggcatacgctgtgcgcttgcccatgacaccttcagcgcaaaagcgacgcgtgaacacaatgacacgaatgttcttgcgatgggcgaacgcgtcatcggcccggggctggcgcgcgaaatcgcaaaagtctggctgacgactgaatttacgggcggccgccacgaacggcggatcggcaaaatcgcagattacgaagaaaaaaatctgtaagaggtgctggacaatggaagagatgaagcaaaaatggacggacatgctgactgagtttcaagagcaggcaggactgacggacggcagtctgctggtgatcgggtgcagtacaagtgaagccgccggaagtcggatcggcaccgccggaagcggagattgggctgaattgatatacggcggacttaaccggtttaaggaaaaaacgggtgtgcatcttgcttttcaatgctgcgagcatttaaacagggcgcttgtcattgaagcggaaacggccgagcggttcaggctccccattgtttcagccgtccccgtcccgaaagcgggcggagcgatggcctcttatgcataccggcagatgcgttctcccgtgctcgccgaatcgattcaggctgacgccgggattgacatcggtgatacgttcatcggcatgcatctgaaacccgttgccgtccctgtccggatatcaagccgtgagcttggagaagcacatgtgacgatggcccggacaagaccgaagctgataggcggaattcgcgccgtttatgaatgcgaatgatgaaaatacttttcctgtataatgttcgtgttttctaattaaattttgtgatttttttaaataagctgttacattcacctgaaaaaccatgtacaataagggtggtaaaaataaagaacaggaaacggataggagaggatctcgctgatgaaacatttacctgtacaagacaaacaagtgtttaacgccatcaaagatgagcgtaagcgtcaacagactaagatcgaattaattgcttctgaaaacttcgtgacggaagcggtaatggaagcacaaggctctgttttaacaaacaaatatgctgaaggctaccccggcaaacgctactacggcggctgtgagcatgttgatgtcgtcgaggacatcgcccgcgaccgcgcgaaagagattttcggagctgagcatgtaaacgttcagccgcactcaggcgctcaggcgaacatggctgtttacttcacgattttagagcacggcgacacggtgctcgggatgaacctctcccacggcggccacttaacacacggaagcccggttaatttcagcggcgttcaatacaactttgtagaatacggtgtcgataaagacacgcaatatatagattatgaagatgtgcgtgaaaaagcgctggcgcataagccgaaactcatcgttgccggagcgagcgcgtacccccgcacgatcgactttaaaaaattccgcgaaatcgctgatgaagtcggcgcttacttcatggtagacatggcgcatatcgcgggtcttgtcgcagccggtcttcatccgaatccggttccttacgctgactttgtaacgacaacgactcacaaaacacttcgcggaccccgcggaggaatgatcctttgccgtgaagagttcggcaaaaagattgataaatccattttcccgggaatccaaggcggaccgcttatgcatgtcatcgcggccaaagccgtttctttcggagaagtgcttgaagatgatttcaaaacgtatgcacaaaacgtcatctcgaacgcgaagcgcctggctgagtctctgaacaaagagggcattcagctcgtatcaggcggaacggataaccaccttgtgcttgtcgacctccgttctctcggtctgaccggaaaagtcgctgaacacgttcttgatgaaatcggcattacatctaataaaaacgcgatcccttacgatccggaaaaaccgttcgtcacaagcggaatccgtcttggtacggcagctgtgacaagccgcggctttgacggtgacgcgcttgaagaagtcggcgccatcatcggcctcgcactgaaaaatcatgaagacgaagcaaaacttgaagaagcgagacagcgcgtatctgccttgactgaaaagtttcctttatataaagaactggactattaataaggaagaaacccgccggaaccttaatccggcgggtttttttatgattttcttgaaactgtttgtctttttctgtagaatcaatagaagtgtgaaaaagtcactcggacaacaaaaaaggagctgaacacagtatgggaaaggtttacgtatttgatcatcctttaatccagcacaagctgacatatattcggaatgaaaatacaggcacaaaggatttcagagaccttgtggacgaagtcgcgtcactgatggcgtttgaaattacacgtgatcttcctcttaaagaagtggaagtgaaaacacctgttcaaacagcgacatccaaagtgatttcagggaagaaactcggtatcgtgccgatcctgagagcgggtctcggaatggttgacggcatgctgaaattaatcccggccgctaaagtgggacatgtcggattataccgtgatccggaaaccttaaaaccggtggaatactatgtcaagcttccttctgatgtagaagaacgcgaatttattgtcgtggatccgctgcttgctacgggaggttctgcggtggaagcgataaacagcctgaaaaagcgcggcgcgagaaacattcgttttatgtgtcttgtagcggctccggaaggcgtggaagagctgcagaaacatcactctgacgttgatatttatatcgccgcccttgatgaaaaactgaatgaaaaaggctatatcgttccgggcctcggtgacgcgggtgacagactgtacggaaccaaataaatcggaaaacctcattcagggggttttctttttttatccagatatttgctgaatgggcagacttcatacatttataggtgaatttgtgaacattctgtgtatgctttcggtataaaaagttttttaactttaaacagattgacacatgttaggggctattgtatgctaaacgagggtattatgagaaggttttcattcctttcatttctagtatccatcctcattttaaatcctccaaaaaacccgttatatgaggatttatctaagcgaatgaaacagcatcccgtggcatcaggaggatgagtggttttttcgaacaggccgttttgcgggacaaaaaaaggccttctgcaaagggttaaccgcatgttttgccgtatccaggaattatattacattttcatcaggagacagatagttgatggacgatcccaatcttacattcagcagacaacggagatatgtatttgtgatcttagcaatctatttgctgggatatggtcttacggcgtataaaactgtttttctaggcctctttttgggaactgttttcagtttgtttaatttatggctcttgaccagaagaatgaatgcttttgacaaggccgtggcgaaaggaaagtccatacgatcactcgggagcgcagcgcgttggtgcaatgcgatacttgcgatggctgtcgcctttaaatatcccgataaagtcagtgtggcaagtgtgattattggattaatgacaatttatcccgtcattatgatagattccattattcagctcaaacgttcatcaatggaagagaggtgaaaacccattgaatcacgattacagaactatggatttgtttggtcttacttttaatctgacaaacattctgatgattactgtggcaagtgtgattgtgctgctgattgcgattctcactacgagaacgctgtccatccgtccaggaaaagcccagaacttcatggaatggattgttgattttgtccgcaatattataggcagtacaatggatttaaaaacaggggctaacttcttggcgcttggtgtaaccttgctgatgtacatatttgtatcaaatatgctggggctgccgttttctgtaacggtcggacacgagctttggtggaaatcaccgacggccgatccggctattactctgactctagccgttatggttgtgtcgttaacgcactattacggcgtgaagatgaaaggtttgaaggaatactctaaggattacctcagaccggttccgcttatgttcccgatgaagatcattgaggagtttgcgaatacgctgacactcggacttcgtctttacggtaacattttcgccggggaaattcttcttggcctgcttgcgaatctggcgacgaatttctactcaaacagcttctttctcggtttggtcggcacagtcggagccattcttccgatgcttgcatggcaggcgttcagcttgttcatcggtaccatccaggcatttatctttacgatgctgacgatggtgtacatgtcacacaaaatcagtcatgatcattaaaatcatatatccattcggataacattttaaaggaggaactttttcatgaatttaatagcagctgcaattgcaatcggtttaggtgcacttggtgcaggtattggtaacggtctgatcgtttcacgtacggtagagggaatcgcccgtcagccggaagcaggaaaagaacttagaactcttatgttcatgggtatcgcattggttgaggcccttccgattatcgctgtcgttatcgcgttcttagcgttctttggctaagcaaaaaagccttatatgaactaaaaatggcgaagatcactctaagagaaccttcgccattgctttatgtctgataagcaggccgtcccgaaacggctttttatcagcagagaaaacctgcagaagggagttgccgtagtagatgtctcaattacctcttgaattaggactgtcgtttaacggcggagatatcctattccaattgttagctatgttagttttattagcgcttctcaagaaattcgctcttggaccgctattaaatataatgaaacagcgtgaagatcatatcgccggcgaaattacgtccgctgaagaaagaaataaagaagcgcagaagctgattgaagagcagcgtgttcttttaaaagaagcgaaacaggaatcacaatcactcattgaaaatgcgaaaaaactgggtgaaaagcagaaggaagacattatccaggctgcacgcgccgagtctgaaagattgaaagaagcggcgagaaccgaaattgttaaagaaaaagaacaagcggtttccgcacttcgcgagcaagtcgcatcactttctgtcttaatcgcatcgaaagtgattgaaaaagagcttgatgaacaagcccaggaacaactgattcaggactatcttaaagaggtaggagaaagccgatgagtggatctgctgtctctaaacgatacgcgtcagcgcttttcgacattgccgttgagacttctcaaatcaatgaagtcgaagaagagcttaccgtactaaaagaagtgttccggaacgaagccggattacaggaagtgttaagccatccgaaggtatcggccgctaagaaaaaagagctgattcagcaatcgttcggcgcactgtctgagtctgtgctgcatacgatttttcttctgattgaccgccgccggtcttcgattgtgcctgatctcacagacgagtttatcaaacttgccaatcaggcccgtcagacagaggacgcggttgtttattcagtaaaaccgctgtcagaagcggaaatgttatcattgtctcaagtgtttgcaaaaaaagccggaatcgcttcgctcagaatcagaaatgaagtgcagacggatttaataggcggcattaaagtccgcattggaaaccggatatatgacggaagcgtaagcggaaagcttgagcgcatggaacgtcaacttgccggaggaaatcgatagaaggggtgaaacctaagtgagcatcaaagctgaagagattagcacgctgataaagcagcaaattcaaaattaccaatctgaaattgaagttcatgacgtaggtacagtcatccaagtcggagacggtattgcgcgtgtgcacggccttgacaattgtatggccggtgaacttgttgagttttcaaacggcgttttgggtatggctcaaaaccttgaagaatccaacgtaggtatcgttatcttaggaccttacagagatatccgtgaaggtgatgaggtcaaaagaacgggccgcatcatggaagttcctgtaggtgaagaattaatcggacgtatcgtcaacccgttaggacagccggtagacggactgggtccgattctgacaagcaaaacacgtccgatcgaaagccaggctccaggcgtaatggaccgtaaatcggtacatgagccgctgcaaacgggtatcaaagcgattgacgcgttaattccgatcggccgcggacagcgtgagctgattatcggtgaccgtcagacaggtaaaacatctgttgcgattgatacaatcttaaaccaaaaagatcaagacatgatctgtgtgtacgtagcgatcggtcaaaaagaatctacagtgcgcggcgtggtggaaacacttcgtaagcatggcgcgcttgattacacgattgtcgtgacggcgtccgcttcacagccggctccgcttctttaccttgcaccgtatgcaggggtgacaatgggtgaagaattcatgtacaacggcaagcacgttctcgtcgtatatgatgatttatccaaacaagcggccgcttaccgtgagctgtcattgcttcttcgccgtccgccgggccgtgaagcattccctggggatgtattctatcttcactcccgtctgcttgagcgcgcagccaagctgagtgacgcaaaaggcgcaggatcaattacggcgctgccgttcgtcgaaacacaagcaggagatatctccgcttatatcccgacaaacgtcatttccattactgacggacagattttccttcaatccgacctattcttctcaggcgtgcgtcctgcgatcaatgccggattatccgtatcccgtgtcggcggatcagcccaaatcaaagcgatgaaaaaggtagctggaacattgcgtcttgacctggcttcataccgtgaacttgaagcgttcgcccaattcggatctgatcttgaccaggcgactcaggcgaaactgaaccgcggtgcgcgtacagttgaagtgctgaaacaagacttgaataaaccgctcccggttgaaaaacaggtagccattctttatgcgctgacaaaaggatatcttgatgatattccggttgcggatatcagacgttttgaagaagagtactacatgtaccttgatcaaaaccataaagatctgcttgacggcattgcgaaaacaggaaaccttcctgctgatgaagacttcaaagctgcaatcgaaggcttcaaacgcacatttgcaccaagcaactaacccttagaagatgagagaaaaaggttctctttttctctctttttacgcaaatgaagaataaaggtggtgaaatctttggcctcattacgcgatattaagtcaaggatcacgtcaacgaaaaaaacaagccagattacaaaagccatgcagatggtatccgctgcgaagctgaaccgtgcggaaaccaacgcaaagtcatttgctccgtatatggataagatccaggaggttgtgtttaacgtcggaaaaggcgcgaaaaacgcgaaacacccgatgcttgtctcaagagaagtgaaaaagacggcgtatctcgtcattacgtctgaccgcgggcttgcgggtgcgtttaacagttcggttttgcgaaacgcttaccgcaccattcaagaacgccatcagtctaaagatgaatacacggtgattgcaatcggcagagtcggccgcgatttcttcaaaaaacgggaaatgccgattttgtctgagttagtggggcttggcgacgaggtcacttttgctcagattaaagatttgacccgtcagacggttcaaatgtttatcgacggcgcttttgatgaactgcatttggtgtataaccatttcgtcagtgcgatttcacaggaagtgacggagaaaaaagtgctgcctttaacggatttcggaacgagcggcgggaagcgcacggcttcttacgagttcgaaccggatgaagaagaggtgctcgaagtgctgcttcctcaatatgcggaaagcttaatttacggcgcgcttcttgacagtaaagcaagtgaacacgctgcgagaatgacagcaatgaaaaatgcgacggataatgcgaaagaactcattgattcactttcgctttcatataaccgcgcgcgtcaagcggcgattacacaagaaattaccgaaattgtcggcggtgcagccgctttagaatagaaagattttgtcaggagggatagcgatgaagaaaggacgcgtaagtcaggtgcttggaccggttgtcgacgtacgtttcgaggacggccatttgcctgcgatttataatgcgattaaagtttcacagccagctacaggcgaaaatgaagtaggcatcgacctaacgctagaggttgctcttcatttaggcgatgatacagtccgtacaattgccatggcatctacggacggaattcagcgcggaatggaagcagttgatacaggtgctccgatttccgttcctgtcggtgatgtgactctcggacgcgtatttaacgtactgggagataaaattgatttaaatgaaccgctgcctgcggatgctcaaaaggacccgatccacagatcagctccttcattcgatgagctttcaactgaggttgaaattcttgaaacgggaattaaggttgttgacctgctcgctccttacatcaagggcggtaaaatcggattgttcggcggcgccggcgtaggtaaaaccgtattaatccaggaattaatcaacaatatcgcgcaagagcacggcggtatttccgtattcgccggtgtaggagagcgtactcgtgaagggaacgaccttttctacgaaatgagcgattcaggcgttattaagaaaacagccatggtcttcggacaaatgaacgagccgccgggcgcacgtatgcgtgtagcactgacgggtcttacaatggctgagcatttccgtgataaacaaggacaggacgtactgttctttatcgataacattttccgtttcacacaagcgggttcagaggtttccgcgcttctcggccgtatgccttctgcggttggttatcagccgacgcttgcgacagaaatgggtcagcttcaagagcgtattacgtctacaaacgttggttcagttacatctatccaggcgatctacgtgcctgccgatgactacactgacccggctccggcgacaacgttcgctcacttggatgcgacgactaaccttgagcgtaaattaactgaaatgggtatctaccctgcggttgatccgctggcttccacttcccgcgcgcttgctccggaaattgtcggagaagagcattatgcggtggcgcgtgaagtccagtcaacgcttcagcgttacaaagaacttcaggatattatcgcgattctcggtatggacgaattaggtgaagaagacaagcttgtcgttcaccgcgcacgccgtatccagttcttcctttctcaaaacttccacgtagctgagcagtttacgggacaaaagggttcttacgtgcctgttaaagaaacggtacgaggctttaaagaaatcctttccggtaaatatgaccatcttccggaagatgcattccgtcttgtgggacgcattgaagaagtcattgagaatgcaaaagagatgggtgtagaagtttaatctggtcctaggagggtaaaagcatgaagaccgttaaagtcaatatcgttactcccgacggcccagtatatgatgctgatattgaaatggtaagtgtaagagccgagagcggtgatctcggtatcttgcctggccatattccgaccgtggctccgcttaaaatcggcgctgtccgccttaaaaaagacgggcagaccgaattggcggctgtcagcggcggatttttagaagtccgtcctgatcaggtcactatccttgcacaagccgctgaaacagcggaaagcattgataaagagcgcgcccttgctgcgaaaaagcgggcggaagaccgtttgaacaaacgatcagatgatactgacattcgtcgggctgagcttgcgctacagcgggctgtaaacagattggatgttgcaggaaactaaaaaagaatccttctcggctgtctgagaaggattctttttctatattaacgcataagagattcatagacgcagataagcggatgatcctcttctttttgcagatataaatgttcgcagcagttgtcggtgtgccacgttttgtttcctctccgcacacccgtcgtataagcgccgtccgtatacggataaggtttgacgacccattcggcatcgtcatggtgtctgatggcgcaatcgatgacatacacactgagcattttctcaaattcgtcaatcggcaggttccaatccgccaaaagcagctcttgtatgctgcggaagtaaagagcttccacttccagcaggctgccgcgtgaataatcaagagaaatgttgaaaaactgacataattctttcagttcctctgtttgagactgtctataatcatagtagaatgctatcgcttcccactcgtggtcaaatacgggaagagtttctccatactgcttttccggatgaaaaaaggaatgattcatattcccatctcctttccaaaaaagtatatcatgccggagaacggacatttaagcggggattgcccctaattttggataaaaattctgatgtaaaaatgatcatctttctctcttcttcttatataataagagaggatatgaggggcggaaaaaatgaaaggagatggaatttgtgaatgtattggggcagcaggccgcaatcagcatcctggttcacctggtatgcattgcggtgacatggtgggcgcttcaggccgtcaactttgatccgctgatccgaaaaggaaaaatagtgcaggcgaggctgctgatcattcttcttaccattgcgatcggtacggcagtcgctgacttctttttagattatcttacctattcgaaacagcttccatacttattttaagatgtttcgtctgttaaaatgaagggaatcgctgggtgagaaaccaatttttcttcacccgcttggcgagttttgacgaagttttccatgtattgctttccccggctccggcaaaaatgggagtaagggggagagatcgatatgaagaaaaaaagagcaggccgcatcatcttgttttttgtttttttaagcgccttaatagcggtatttcattccattcatgcaagtgagctgtctccgcttgcccagattgccgaaggaatggagcggcagcaggtcactgtagatgaatggacgcttcatgcgaaaaaaaatctgaacctgtcactgagtgaatttgatgacaaggtaaaagaactgaagacgcagtatccgcaatatcattgggaatccgcgcgggaagataaaatcgtaaaggccgtcggcacgtattctgacaaaaaaaatcacacaacttttaaactgcagctcgtcactaccctcaaaaaccagaacccaacttcgtatttattatatgagcaaatgagcccggagcaaccgaaaaactggaatgatacatatgaacagtttgaacggcaggcacatgacatatttcaaaataaagtatttatttttacttgtctaaagggtcatttaaatgataatatgagtattgttttgcaaaaaaaagcagaacagctcatgaaagaatttgaagcaagtccagttgaacatgtagttgagcctcatttcgtttctgtttctgcatttacatataagtggacagattacatcatgacatcgaaacataagatgaatgtgcaagttgcgcttagaagtgcgggaatgggcgaaaaacataccgttacggttggcacaccaatcgtgacgactgaatattaatatagagaatatagggacgcggaggggaataccttggaaaaaatcatcgtccgcggcggtcagaagttaaacggcacagtgaaagttgaaggagcaaaaaatgccgttttaccagttatcgctgcatctttattagcaagtgaagaaaaaagcgtaatatgtgatgtacctacgctctccgatgtatatacaattaatgaagtgttgcgtcatttaggagcagatgtgcattttgagaataatgaagttaccgtaaacgcttcttacgctttagaaacagaagcaccttttgaatatgtgcgcaaaatgcgcgcgtcagtgcttgttatgggccctctgttagcccgtacgggtcattcaagagtagcgcttccgggcggctgcgcaatcggctcaagaccgattgatcagcatttaaaaggctttgaagcaatgggtgcaaaaatcaaagtaggcaacggctttattgaagcagaagtggaaggccgtctgcagggcgcaaaaatctatttagatttcccaagtgtgggtgcgacagaaaacttgattatggcagctgctttagctgaaggaacaacaacgcttgaaaacgtggcaaaagagcctgaaatcgttgacttagcgaactatatcaatgcgatgggcggaaaaatccgcggagccggcacaggcaccattaaaattgaaggtgtcgaaaagcttcacggcgtaagacacaacatcattcctgaccgtattgaagcgggtactttcatggtggctgcggcgatcacggaaggaaatgtattagtcaaaggtgcggttcctgagcatcttacgtctttaattgcgaagatggaagaaatgggagtcaaaattacggatgaaggagaaggccttcgtgtcatcggtcctgcccagctgaagccgatcgacattaaaacgatgcctcacccaggattcccgactgatatgcagtcgcaaatgatggcgctgcttctccgtgcgagcggaacaagcatgattactgaaactgtgtttgaaaaccgttttatgcatgctgaagaattccgccggatgaatggcgacattaaaattgaaggacgttctgtgatcattaatggtcctgtacagctgcaaggcgcagaagttgccgctacggacctgcgtgcgggcgcggcgctgattcttgcgggattagtggctgaaggtcatacacgtgtcacggaactgaagcacttggatcgcggttatgtgaatttccatcaaaaacttgcggctctcggcgctgacatcgagcgtgtcgttgatgaaacggccgctgaacaagaaagcaaagaagtcgtaactgacctaaacgcataatggctgtaaaaacagtatgtcaatctggcatactgtttttttatggtttatcatcattattatgctctgatttccaaaaaagaatacgtttttcgcgtgaaaaatggaataaagattctgtccaaaaggaagtcatattagcttgtccctgcccataagatgaagtagagtcgaatcccaagcaggaggcagctgatatatgaaaccgattgtatttctactatccgggctgtgtatacttattcttcttgtccccaccattctcgtccttccgtttcaggcagaaaaaggagcagccgtaaatagagagcccggacacaaaacagcacacaccacacgagaaacaaaaggagcagaaacattgaaagaatcacctgtatccattccggtttatcggacatccaatcattctgtagagaacattccgcttgaagagtacgtggtcggtgtcgtggcttccgaaatgcccgcaaactttaaaccggaggccttaaaagcccaggcgctcgccgcccggacattcatcgtcagactgatggtcgctgactcagccgttcaggcgccgaaaggatcactggtggatgatacgcaaatgttccaagtctatcaaagcaaaagccagctgaaaaaagaatggggttctaagtacgcacacaacctcaagaaaatcacaaacgcggtggccggcacgcaaggaaagattttaacgtacgataacaagccgattgaggcatctttcttctctacgagcaacgggtatacggaaaatgcggaagcctattggacaagcgccattccttatttaaagagcgtgaaaagtccgtgggataagcaatcgccgaaatatctcgccacccagaccttcagtgtgccggagtttcagcaaaagctcggcgtacagctctcgggacaaaacacggtgggacagattacagccagaacgccgggccatcaagtggcgacggccgttatcaacggcaaaaagctgaagggaagagacatccgggaaaaactcggactccgttctgccgactttgaatggaaacggaacggcggcagcatcaccattacgacaaaaggattcggccacggcgtcgggatgagccagtacggggccaattacatggcggagcagggaaaatcagtggcggacatcgtcaagcattattatcagggagtggacatttccgaagcagattcatttttaaacaaatatatggcgaaaaaatagacgctttcatgagcgtctatttttttgaaaactattccataaacggtaaagcaaccaacagactcatataacgaaagcctaaaggctgacaaatgtcgattgaaggctgagcgccgggtgtaaatcactgataaaaatgccgcttctatgtgaatatacgcaaaaataatgaggaacgccgtcctatttatttccctattcatctcatttacgataaatattgttcggcgttgaacgtaaatctattgaaaaggggaaaaagcaatgaaaaaaacattttcactcatactcatgctcggattgatgctgactgctgcatctcctgcttttgctgccgagaatgcaaacgagaagactctttcatttaaaaacaatacagccattttacttgatgcgagcggcagtatggcaaaacggattgacggtgtttctaaatacaacatggcaaaagaagaaattgtccgttttgcggatcaaattaaatctaaatcacaggtcagaatgacggttttcggttcggaaggcaataataaaaactccggaaaggttcaatcttgtgaatccattcgcggtgtgtacggattccaaaggtttgacagacagagcttccttaactctcttaacggaatcgggcctacgggctggacaccgattgcaaaagcattagaggatgcgaaggcttcctttaccggtttgcacaaacttggcagtaaatccgttttcctgttgacggacggcgaggagacatgcggaggagatcctgttaagacagcgaaagaacttcgcaaacagcatattaaagtcaacgtgatcggctttgactttaaggaaggcttcaacggccagcttcacgagattgccaaagcgggcggaggaaaatattacgaagctcacagccaaaaggatatgaaccgcatctttacaatggcagcgagttcattagcggaataagaaaaggtgccgtttatcggcccttttttttatttttatttaacaaaaatttcaagaaaaggtgaagagaaaactgtaaaaagaatcagattccggacttatattacaaaaagggcgaaaaaggcattaaatctgtcatcatttatccaatctttttaggatgatgcgcataattctgttcatttttaacggcatacagccgcttatacaaaaggaatcccgccctatatctttttgcatactcgtcatctagcatagagaagagccgggggcccatcggccaaaaacaaacggagaggaatgaaggaaatgaaaaaaatgttcactgcggggattgtcggacttttgacgctttcactcggatcacctgtttttgcagctgagaaaaagcacgaagaaacaaacgttgccgtgctgtttgacgcaagcggaagcatgatacaaaaaacagggggagagcgtaaaatagatgtcgcgaaagagtctgtcacttcttttgcggaagttcttcctgaagacacgaatctgatgcttcgggtattcgggcataagggcaataataaaaactcaggcaaagccgtatcatgtaatgcgacagaaacgttatacggccttcagccgtacgccgtgactccatttgagcaatcactcagcaagattaaaccgaccggctggacaccgatagcgaaagcgctttctgatacgcgtgaagaatttgagcgggccggcgccacggggaaaaacgtcgtatatctgatcacagacggtgaagaaacatgcggcggtaatcctcaggccgaaattcaaaagctccgtaaagcgaacgtcaacacgatcgtcaatatcatcggcttcaacttcggcatgaaaggaagcgaaagccttgaaaaagcggcggaagcgggaggcggcacatatgtctcagctgacagcgcggacgagttcaaacaggcttgggaagacgctgcaaaggatttagcaaaagaataggttaaaaaaggacgcccgcgcggcgtcttttttgtttagaaaacggaaccgtgggaatgatacggataaaaggagatgaacgctgttgttaaaaggagcaggcattatattagtgctggcggcagtcgtttttgttctgatcggaatttttctgaagcttgccgccttcatattcgtcagtatattggccattatcgccgcagttatattattcaccattctgagcagacatcatcgcaatgaaacatagagtcctaagagggctctttttttaaaccgcaaattcgacaaaatacagggattgtggaagaataaaagagaaggatactgcggaggggaaaacagtggataaaagaacaacagcggtaagggacatataccgctatgaaaaaggggtattaacaaagacggcggatcggatggtttcagagtatccgctgaccgtcatggtgaacggacaggaatttgttacactcgtctgcacgcctgaccatttagaggaactcgtcatcggatttcttgcatcagaaggcgtcattcgttttgaaaaagaaatcaaaagctttactatagatgaaagtctcgggtttgcatatgttgaactgacgaatcccggggtgcttgagcaaaaagactatacgaagagggtcatcggttcatgctgcgggaaaggccgccatttttactttcagcaggatgcgaaaacggccaaaaccgccgtcagccgtatcaccataactcctgagacgtgccttcgcctgatgaaggagatgcaaagcggaagcggcaccttccgggaaacgggcggcgtccataatgcggcgctgtgcgatacggaaaagctgctctttatgaggacggatatcgggcgccacaacgcgctggataagctgtacggctgctgtttgaaaaacggaataccggtccgtgacaagctgatcgtcttcagcggccggatttcctcagaggttttattaaaagccgcaaaaatcggcgtgtcgattgtcatttcaaaatcggcgccgacggagctcgcgctgcaaatggcggaagagctgaacataaccgcgataggttttgtcagaaacggatcatttaacatatacacacatcctgaacgggttgaacaatagaaaggggtcttgggcttatgaatacagaaacgcgccgggtgacagacaaaagggaaaggccgctcagggatcttcgtatctctgtaaccgaccgctgcaacttcagatgcacgtactgtatgccagccgaattattcggaccggattatccatttttacaaaagacggaattgctctccttcgaggagcttgagcggcttgcgaagctgtttgtcggccgcttcggcgttgaaaaaatcaggctgacgggcggagagccgctcatgagaaaagatatgcctgaattgatcaaaaaacttgcgcgcatccccggacttaaagatatcgcgatgacgacaaacggctctctgcttcccgtgtatgcggaaaaactgaagcaggcggggctgcatcgcgtgacagtcagcctcgattctttagaggatgagcggtttaaggccattaacggccgcggggtttcggtgaacaaggtgcttgagggcattgaggcggcaaaagcggccggactcggtgtgaaaatcaatatggttgttcaaaagggcgtcaatgaaaaagatatcctgccgatggcccgctattttaaagaaaagggtcatattctccggtttattgaatttatggatgtcggcaatacgaatcaatggaataaaaaagacgtgatcacgaaggccgagattattgatttgatcaaccagcacatgccgacggagccgatagaagcgaattataaaggagaggtcgcttccaggttcggctatcttgacggttccggcgaaatcggcgtgatttcctccgtctcggatgcattctgcgcctcctgcaacagagcgcgcctgtcggcgagaggcgagctgtttacgtgcctgtttgcgtcaagcggctatgatgttcggaaactcgtgcgcggcggtctgaccgatgacgaattgacggaatccatcgcctctgtctggagaaatcgcacggatcagtattcaattgaccgcgcgctttctaaaacggatgggaaaaagaaagtggaaatgtcttatataggcggatgaagaaaagcttgcccggacaagggcaggcttttttattcacaatatgagagcggtctgttcaaaaaataccgatgacagccgaaatatatgataggaattttgatgcaggacaatcaagttatgcaattccaaagccatacaatatgttaaaatataaccaatagaaattagaaaaggttgtgaaaggggcatgaccgcatacgagattccgtcatctcaagttggagttaagatcaacaaatggtacaagcacattttagcgtttcaagcggctgatgccataaagctgaaagaggaaattgatgaggatatacaacgtatggaggaagaccagctgctgctgttatattatcagctgatcagctaccgccatcatattatgcttgattacgtcaagccggaatgcaccgaacaatcacagattcagtacagcgagctgcaaaagacgatcgaaagcacggacagcatatcgggactgtctgagtattatttccatttgttcagagggatgtatgaattcgatcacaataactatgttgcggctatttctttttaccggaaagcggaaaaactcctttcatttgtcgaggatgatatagagagggcggaattccatttcaagatgtctgaagtgttttatgtcatgaagcagactcatttttccatgaatcacgggattcaggcgctggatacgtatatgaaacacgatttctacagagtgcggagaattcaatgccatttcgtcatctcaggaaactacatcgactgcaaaaactacgacaaagcgcttgagcatttagacgaagccctccgcctttctttgcttgaaggacagccccgcctgatcgggtcttcgctttacaatctggggaattgttattctgaaaagcgcgatctggatgaagcggcccggtactttagaaaagcggttcccgtttttgaagagcatcagcttgaacagcttccgaaggcgctgttcagcttaacgcacacccttttcaggctgcatgatgaccaagcggcccttacctattatgaaagaggggtcatgatcgcgaaagaacggggcgaccgattcagtttagagaagtataagtttttacaagcgctttatttggagtcactcaatatggatttaatccatgaagtgtttgactatatgaatgaaaaatcgctgtatgtgtatattgaagatttcgccttggaggccgccgtttacacaagcgcacatgagcaatataaagaagcggcgtatttttatgaaaaagcgattcgcatgagagaaaacattcaaaaagaacagtgtttatacgatatataattttcttaaccatctgctcagcagatggttatttttttatgcacatcataacgtttgaccataggaaaaaacggaaaaatcgcaaaagagagaaaaaagcacgaggggaaggagggatttgttgttcggattcaatgatatgataaagttttttgtatcatttctcatcattctgccgatggtgtctgtcatccatgtggcgggacacagctttatggccatgctgttcggaggcaaggcatcattggatatcggaatggggaaacgtcttttaaaagtagggccgattcaggttcggcgtatctacttcatagattctttctgcaagttcggcgaattgcggatagataaccgtctgacgagcgcgctcgtctattccggaggctgtctgtttaatctcgcttctatctttttaataaatctgctgatcataaaagatgtccttgagccaaacttatttttttaccaatttgtctatttttcaacttattatgttttctttgctcttctgccggtgcaatacggggataataagctgtcagacggattggccgtttacaaagtgctccgctacggggaacgctgtgaaatcaataattgagagtttacatgtttgtgttcgggctgaaagggaagaaaacaagtacacagaataaaaaaggagctgaagagatcatgagtgaagataacggtttaaaagacaaagtaaaaggcggcatgaacaaaatgaaaggggaagcaaaggacaaagcaggtgacatggcaaacaagtccgacttaaaagcggaaggtaaaaaagacaaagcgaaaggcagcctgcaaaagggtgtcggcaaaacgaaagataaactcagtgatgattaatttgatagtgaaacacagcaaaagcccaaaatattttgggctttttgttatgagaaatgacaaaaattccagttcatttggttaatattcactaaatttttaaatattctataaatttatcgacgatttctttataatattcacatagaatgtaacctttcttcacatttgattaaacgtttgttgaagaaaaaaatgagaaatcggtaatttctgcaaaaggaatcgggccgttcaccgtcgaataacttttatcacttaacatttcatgaggtgaagggggtgacggccgcctgcatcgtttcggtatgaccatgcggattgtgtttgactatcactaagggggaatacagatgaaactgacaccggttgaacaagaaaaattgcttatttttacggcgggagagctcgctaagcagcggaaggcgcgcggcgttctgctgaattaccctgaagccgccgcatatttgacctgttatctgatggaaggcgcgagagacggaaaaagcgttgctgagctgatggaatccggccgcaatgtattgacggaaaaagacgttatggaaggcgttccggaaatgctggacagcattcaggtggaagcgacgttcccggacggggttaagcttgtcaccgttcatcagccgatcaaagcggaggtgaagtcatgaagccgggagcgattcaagtcgcaaaggggaccatcaccattaacgaaggccggaagacgctggaggtgtcagtcaccaataacggaacacggtcagtgcaggtaggatcgcattttcattttgccgaggccaacggcgccctttccttcaatcgggacaaagcaatcggcatgcgccttgatatcccgtcaggcacatctgtccgttttgaaccgggagaagagaaaaccgtcacgcttgtggaaatcggagggcgaaaaacggtcagaggtctcaacggcatggccgatacttatatggatgagcggggaaaagagaagacgctgtcaaatcttaaaaaagccggatggatggaggaggcgatccgatgaaaatgtcacgtgagcaatacgcagaactgttcggaccgacaacgggagacaaagtcagactcggagatacggatttatggattgaagtcgaaaaagatttcacgaattacggtgaagaaatgattttcggcggagggaaaacaatccgggacggcatggggcagaacgggcgtatcaccgggaaagacggagcgcttgatctgatcattacaaacgccgttatcctggattataccggaatcgtcaaggcggatatcggggtgaaggacggccggattgtcggcgtcggaaaaagcggcaaccctgatattatggatggggtggacccgcacatgattatcggtgccggaacagaagtcatttccggcgaagggaaaatcgtaacggccggcggggtggatacgcatatccactttatctgcccgcagcagatggaagtcgcgctttcttcaggcgtgaccacgcttctcggcggcggaacgggtcctgcgacgggaagtaaagcgacgacttgtacatccggtgcatggtacatgtcgagaatgctggaagcggccgaggagtttccgatcaacgtcggtttcttaggaaaagggaatgcatccgataaagcgccgctgatcgagcaggtggaagcaggcgcgatcggcctgaagctgcatgaagattggggatcaacgccaagcgccattaaagcttgtatggaagcggcggatgaggcggacattcaggtggcgattcacacagacacgataaatgaagcgggctttttagaaaatacgcttgatgcgatcggcgatcgggttatccatacatatcacatagagggagccggcggaggccacgcaccggatattatgaaactcgcatcttacgccaatattctgccgtcctctacgacgccgacgattccatataccgtcaacacgatggacgagcatcttgatatgatgatggtctgccatcatttagattcaaaagtgcctgaagacgtggcattcagtcattcacgcatcagagcggccaccattgcggcggaggatattctgcacgatatcggcgcgatcagcatgacgtcatctgactcgcaggcgatgggcagggtgggagaagtgattatccggacatggcaggtggccgataaaatgaaaaagcagcgcggcgctctatcaggagaaaacggcaatgacaatgtgcgcgccaaacgctatatcgccaaatacacgatcaacccggccgtcactcacggcctgagccatgaagtcggttccgttgaaaaaggaaagctcgccgacctcgtactatgggacccggttttcttcggcgtcaaacctgaacttgtgctcaaaggcggcatgatcgcccgcgcccaaatgggagatccgaatgcttccattccgacgcctgagcccgtgtttatgcggcagatgtacgcatcatacggtaaagcaaaccgaaatacctctattacatttatgtcccaggccggtatcgcaaacggtgtgccggaaaagctcggccttgaaaaaatgatttctcccgtacggaatatccgtaagctgagtaagctcgacatgaagctgaatgacgcgatgccgaatatacaagtcgatccgaaaacctatcaggtgttcgccgacggagaagagctggcatgccagcccgtcagctatgttccgctcggacagcgttatttcttattttaatccctctcaggccggtttcccgccggcctgtttacacctctattgccaacttgatttcatcctgccgcccgttttagtgtatattagtagttgacaaacaaatgaaatgtaactattgtggttacaacggtggtgaaaaacatgattaacagccgtcttgctgtggccattcacattctatcgctgatctcaacggatgaacgggcgtcatcggacatgattgcgggcagcgtaaacaccaatcccgtcgtcgtgcggagaacgatcagccagctgaaaaaagcgggtattctgacatcccgggcgggtgttccgggagccagcctgaaaaaagatccggcggagatcaccctcttagaggtttacaaggcggtgcagaataaggaagagctttttgcggttcacgacaatccgaaccccgactgtccggtcggcaaaaatattcagcgcgcgctcgatgagacgttcggaagcgtacagcgggcaatggagaatgaacttgcgagcaagtccctttatgatgtaatgaatcatctcttttgttaaaaagagatggttcatcccgctatcggtgtaacaaggatggttacaatgggtaatgaggaaatcacggtattggctctatattcagacaagcctggatgcgggattgcgatctgtttaatgaaaaaatcctccgaaactaaaggaggcggttaccgggatatttttattttgcttaaggcttatgtgaaggtgtcagctgtgagcaagttaaacaaaaaatgatatcctgcttccagcaatgccaaaaccgttcgcctcttaataatcattataaaatgtctcaaggaacgatcagcagcccgttagctgcccctaattaaagatgagctgttaccacactgttacattagaacttccgctgcttttatatccttctgtcgctaagacttgataagcccaattactgcccagattcattccatggctcttccaggcgttaacatgattgctgaaagtgattgcagcgttgcttccggttggtctcttcgactggcgaacactccagtactgcgtaaaagtagtgttatcgccatcaatggaaggtgcgttataacgtgtcgttgtatatatgtcatatgtacctccatcactttttacggtacctttatacgttccggtaggtctgtaagtaccccatgaatccaccacataatattcgatgagaggtgctctcgtccagccatataaagtcaaatatccattcccattcggcgcccagactccggcattatagtttattgttctaaatggcgagcctgtagtccagcctttaccaacaacgaaatttccggtattagaccaattaacactgtaattcccgccagatccattgactgcgtttactgttccgcccccatcagtccaattttgccagtaatctgtgccagctgcagaagcggttgccgaaaacatgctgatactcatgaaagctgccgttaatccaactaagaatttctttttaaacttaaacatatgttacctcctatactattttttctgactttgacatgaggcagcactcgtaaatatttaacgaacgccaacgcttttgatcgttcctttcaatataatagcatgaatacatgagtgaatattaagaacaattgtaatttaattacaaagacccaaaaaaatgtatgataagcggtcttgttccaccatggcttttatccttattttgcagaatcacaattcttgcttctaaacctgatcaggaacaggcgaacaattgagtgatttcagctgaaactctgaggaaaagcttttttgatgtgacggcgacacgtgtggctgaagccggaatgtctgaaagaatatctgcagacagcgtctcagctgcgctattatgccatcgccgtattggcaaatccaaagcagaaaaactttcccgttgtcgaagaagcggaataagaaaaaatcccgggcggatgcgccgggattttcctttttaatatgtattggcatcaatattattaaacacgccgtccatgatgccgagcgtcatgaggacaatgaagagaacgataccgagaacggacaagccgaccgtcacaatcaggtagatcccctgcattttcacgaactttgcataattctccagcatatgttcctctgtcagttcattgaactgctccgccatctgtcccgcttcatttgccgagcgcatcagaaaaatgccggcaatgatctgcagaacgccgggaatggctccgattaaaaagaaaaacgcgcccgacagcgccgcaaacgcacccatgataataaataaaatacctgtcgcttttccccatttcgaaatagaaataagcgaacgattcactgattcaggtttcaaactatggcactcctttacaaaaaaatactcacttttcatttatacactattcggtcattcttttgaatataaaatgtgttttttcgtgccgtgtccgtttttatatcagaaaattcccgagaaacaccccgggaattacaaaatcggcgaaagaagtcttgaaatcgattctttaatgcggatccgcagcgaacgctcctgatattcttcatacgtatattttctggagacgagcagatcttctttaaatgaggaaatgagttttttcgcgatggtgacgtcataaataaaggcgttgacttcaaaattaagtctgaagcttctgacgtcgatattcgccgtaccgactgaagccgtctcatcatcgacgacaatcgtttttgcatgaataaagccattatcataaatgtagactgaggctccggctttcaaaaggtcgccgatgtaagataaagtcgcccagtaaacgaaagcgtgatccggcttgttcggaatcatgattttgacgtcgatgcctgacagacaggcgatcctgagggcatctaaaagacttgagtcaggaataaagtaaggcgtctgaatcaggatcgaccgtttggccgttgagatcatcttgatatagccgtttttaatttgttcccattctgaatccggtccgctcgtgacaatctgcatcccgacattgcccttcggctcgcattccggaaaatgattcggaacgtatgtgagcgtatgatgatgggaggcttggttccaatcgaggataaaccgtgtctgaatggcgtgtaccgccgtgccttgaagcctgaggtgcgtatcgcgccagtagccgaatttcggattcaggccgagatactcatctccgacgttaaagccgccgacatagccggtttcgccgtcaatgatgacgagcttgcggtgattccgataattgagccgcaaattaatcggacgaagcctggaaggaaaaaagacttccacatggccgccggcgtcccgcagcggtttgaagaatttttttctgagtgatcttgaaccgagttcatcatataacactctgacttttacgccttcgcgtgcttttttcactaaggcatcgcgcaatttttttcccagttcatcacctttataaatatagtattgaaggtgaatgtgatcttttgcgttggaaatgtccttcattaagcgtttgaacttatcgcgcccgtccgtcagaatctccaccgaattatcctctgtaaagactgcgtggttgttcatgacaagcatatagatgaggtctttattatccacagtcgctctgttgttaaattggaattgcctcgacttcagatctttcagctgagacttcagcagcttttcaatcccgatttttttacggtcttcccattgaaacagatgcttgcgtctcaggttatggccgaataacaggtataaaataaaccctaaaatgggaataaaaaaaagaaccaagagccaagcccatgaagcgctggcatcgcgtctttctttgaaaatcatgatgacggccaaaagtatatttaaaacgaaaaaaaatccgaataaaataaatgaaatgctcactttgcaaccccgctatatcatatttatcaagactgtgcccattagtattccgacaagtgcagcaatctgattcccatttcaaattataacattgacattttgaaagaataaagagccggaatcaaagttgaatgcagttttctttcaaaggaagttccgggtgcgttaaaatatgcatatatgaaaaagaagacaaaaatgacagcaaaggggagagggcatgaagctggagcatgcggaacaattgccgggattcataaaaaaagaaattcagaaaatacaaatcgccattgcgccgctgatgaaaaaaagcatcatttaccgttttcttgctttcccgctcgccgcttttagtctgtttcatctggcatcgcttttgattcaggccccttccgggagaggagctctcgtgtcggccggcatttttgcactccttgcggccttgggtcttgcgttgtttaaggaagccggctatcagcggaaacaggtgcaaaaaacgatccgcctttatatgctgaacagaatcagaaaaagcgatattctgtccgaggaacggaaaagcgcctatacccggctgattgccgaggagccgtctgcgatgaagagctttattgaatttttaacggaagaagaccggaaaaaagaaatgctttattaaaaaagagctgacgcgcgatcagctctttttgtcattcaaacaccgggtcgttctcatagtaatatgaatcaggcgtgtcatacgtatcagtgctgtgataagcgataattccgatgacagcgaagatgacgactaaaataaaagcgagaatgcccaataccacactggatgccgcataaaaaaactgcattttgataaatgaggcgtaatgtgcaagcatattttcttccgcgttttcttctagtccttcctgaagggcggcagccgcttttgccgagcgcatcagcataacgccggaaatgatgagcagaacccccggaatggctccaagcagcgtcacaatcgctgacagagcggaaagagagcccgtgatgatcagaaacacggcggtgatctttccccatttggcgatgtcggcaagggaacgggtttttttattgagcggctggttttcgtctttgtctttatcgatggtgatcatgacagttctctccctaaaatgttcaagtcatatcgttttccgtccatttcggcgatacccgggaatacgccccattcggtaaaaccgaatttttcaaacagcttaatgctcggcacattatgtccgaagataaaagccatcaggctgcggatgccgattgccggagcgagtgccagggcttctttcagcagaaagcttcctgctcctttgccgcggcaatcctgatgcagatagatgctgatctccgccgttttgtcataggccggacggccgtaaaacgtttcaaagctgatccaggccgccactttgccggtttcatcttccgcgaccatcagcgggcgccggtccgtgtgccgcaaaaaccaatccatccggtctgcgggcgtcacttcttccgtatcagccgttaccattcgtgaggcaatcgtcgagttgtaaatggccaccaccgcatctaaatcctccaatacggctttgcgcagggtcaaattcatattccgggatctcccttcacatttcattacataaataagtgcaatctgcacatactatttccaaaaaagttttttatggatgtgtatatattttcagaaaagtgttcagaatgttgctgaggtgatgaacaaatgagagaggaagaaaagaaaacttctcaagtcaaaaaacttcagcggttttttcgcaaacgctggatattccctgcaatctacttagtcagtgcggccgtcattttaacagctgtcctttggtatcaatccgtttcgaatgatgtgaaggacaatctgacgaacaacggcggaaactccgcgtatgacagcggcaaagacgatgccatcgaagtaggcaagtcaatggaaaacgtcgcaatgccggctgctcattctgaaaatgtttctgttgtgaaaaagttttatgaaactgatgccgcaaaaaaagagaaagaagcagcacttgttaactataataacacgtacagcctcagtaaaggaattgacttagctgagaaagacggaaaatcatttgatgtttctgcttctctgagcggtacggttgttaaagctgctaaagacccggtgctgggatatgtggttgaaattgaacactcagacggcctgtctactgtctatcagtctttatctgaagtcagcgtggatcagggcgacaaagtaaagcagaaccaggtcatcggtaaatccggaaaaaacctttacagtgaagaaagcggaaatcacgtgcactttgaaatccgcaaggacggcgtagcgatgaacccgctcaattttatggacaagccggtaacatctattgaaaaagcggcggctgaagagaaaaacgctgtgacagaagaaacggaaggggcaattcagcagtcttccgagaaaaaagatgtgacgcctaaaaaagaaaccgaagaaaaaccaggtgacaaagaggacggcacaaaagacaagacagatggtaaagatgacggctcaatgaaagattcgggcaagtaatcttgatcccaaagcgcctatcagctctgataggcgcttttcatattgccgcatgtgcctttatactagtagaaaacgaggagatgctgaatgaataaatgtctggcggccgggtggctcgtctttgttttcgtttctgctttgactgaaagctttcacgatatgattgtgtcgcagacggtgtccttccgtttcacgccccatccggatgtgtccggtttctttgtgttcgatatggcggagctcgccataccggaagcggcgattcaaaagcttgggcacgcgttttcattttttgtgctcgcctatttgtttttcagggagcgcaggcgcatgaagagggcggtgctgtatgcattggccgccgctttcctgacagaaatcgtccagctctttttcggcagaaacggatgcctccgcgatgtgctgattgacagtctcggcattgccgcattctgtgctttacaaaggaaaaagcatacagccaaacatacaaaaaccggcagtctgtgacagacgccggcttttttttatatattatggtttgtcgatttgcttttatgaacgatactttcatagattcgcacgatcagatcgacaatcggacgaagcacatttgaaaatctgaacagcaggaatccgacaatgagggaaacgataatgcttccgagcacatcgatcggataatggtggccgacccaaattcttgagaagccggtcaaaaggccgaaaatcacaagcggccagccgagttttttgttgcggaacagaatcgcaattgaaatcgccaaagcgcctgtcgtatggtcactcggaaatgaagcatccgcggcatgagggatcagcgtatgaaccgtatgctcgacaaaggggcgcggctcgacatagactttcgtgatgaggtagttgatgataagcgccgcaacacccgtgaagcccgcgtacagggcgttttgtctgccttttgtgcttccgaacagccacatggcaagcaggaaaagggcgtaggcgtaaatggcgtattccgttataaataccatgatagagtcgagaatggcgctatggtgcgacaaaccattgatcgctttaaatagttcgtaattcacaaatatcaccttttatctttattttatatgaacagtgtaatgcttttttctatgagacacaattggtattaaaaataatcataaaaaagtaaacagaatgaaacgtgactgtattactgtgcgtcaagtatgcgggaaaagaatagccgaaggagttttgtccgttgctgaaacgtttgaaaaacgccgatctgccgcttgtgtttgtcattatgctgctttgcggattcggcttgttaatggtgtacagcgccagtgatgtgatggggtctcagcggtacggagatccatcctatttcttccataaacaaagtacctctttactgatcggattatgcttatttctatttgccgcctgtctgccgtataagcggtatgcgcggcttgtaccgctgtttgtggtcggttcgctggtattgctgctgctcgtattgataccgggaatcgggctggagcggaatttttcccgcaggtggctgggagcgggcccgcttgtcgtacagccgtctgaattggcgaagatcgccatgattttgtatttcgcttcgatttacacgaaaaagcagccgtacattcatcaatttgtgaaaggggttctgccgcctttagtgattttggggaccgcttttctgctgacattggcggagcctgatttagggacggcttccttaatcctggcggcatgcgggtcgattttattatgtgccggcttgaaaaagcgccatctgttcgtgctcggcgcgacggcggtgtccggggttgtttatctcgcattttccgcttcctatcgtgtgaagcgcctcgtttcctttaccaatccgtttggtgatgcgaacggggacggctatcagctgattcaatcctattttgctatttccggaggcgggtttttcggaagagggcttggaaacagtgttgaaaaaatgaactatctgcctgaggcgcataccgatttcattatggccgtgatcagcgaagagctggggatattcggtgttctgatcgttttgggattatattttgcgttaatgcttctcggcgtaaaaacggccgtgcgggctgatgacccgttcgggaagcttcttgccatcggaattacgtttcaattaatgtttcaggttgtattgaatttgggagcgatgagcggactcctcccggttacgggtgtaccgcttccgtttatcagctacggcggttcttcattgattatgacgctgtttttatgcggcatactggtcaatatcagtacatatgcgaaaaaacaacccgtacggcataagcggcctgtcccgcatgaaaaaaaggcttcttctttttaatgaagcctgaaaaaaacgcccgggacatttctgtctccgggcgttctgtctgtttataaagcttctggtccttcttctccggtgcggatattaatcgtgtttccgatttcatagacgaatattttgccgtctccgggctctcccgttttcagcacttttttcgccgtttccacgacttgatcaacgggaaccttgctgacaacgatttccactttcagccgttcatacacattgctttcaattttgactccgcggtacagttcggtgtgggctttttgaaggccgcagccgtgtacgttggagaaggtcagcgatgtgactccgattttaccgagttcctgtttcaatgtttcaaacttagccggacgcgtaacgatttctaccttgaacatttgaccgctcatctaagccactcctcactttataagtcctgatatgctttttccccgtgcatcgttaaatcaagcccaagtgactcttcttcttcactggcgcgaaggggaatgaacagacctacaattttaatgataacgaaagtgacaataaatacaaatacataggttgccgcaatggccgcaatctgcttccagagcagtcccggatcgccgtaaaacagcccgtttgccccgccgtcattgacggaagtggtggcgaataaaccggtcgcaatgccgccccatgtcccgccgatcccatgcaggccgaaagcgtcaagcgcatcatcataaccgaaagtctttttgagccaatacacgccccagaagcagacaagcccgccgatgaaaccgattacgatggaagagaatggcgtaacgaacccggcagccggcgtaatggcgacaagcccggcaatagcgcctgatacagcacccagcatggtcggttttttgttcagcatccattcgattaaaatccagccgataattccggccgcagccgcggtgtttgtgttaatgaaggcaaacatcgcgatactgtcaagcgtgagggcactgccgacattgaagccgaaccatccgaaccaaatgagcgctccgcccaagaacgtgtaaattaagttgtgaggggaagccgccgtgccgtccttgcgtttcccgagcacaatcgccagcacgagcccggcgactccggaagaaatgtggacgacgtttccgcctgcgaagtcaagagcgcccatctggccgatccagccgccgccccatacccagtgcgcaacgggggtatatacgagggaagcccacaaaaaggaaaatacaagaaaagcactgaatctcatgcgttcagcaaatgctccggaaataatggccgtcgtcagtacggcaaacgtcatttggaacatcatgaacaaggaatgcgggatcgtatcactataacttccgggttcaaagccgacccccttcagccccgcccattcaatcccgccaagccatgtattcccgggggcaaaagcaagtgaatatccgtacaaaacccaaacgacggatacgatggcgagagaagaaaaactatgcatcgccgtgctgagcacgtttttgctttttaccattccgccgtaaaacaaagccagcccgggggtcatcagccacacgagtaaagcgcaaaagaacataaatactgtatcgcccatctgcatgttgtattcctccgtctcattcagaatgtaattgtgattaattcattattatagagaaaaaagaacgataaaacattgtcgtgtaaggttatctgacatggttttttgcgttcataatgctgctttttcaaatgggtgccgtgcgactttatatccataaaaagagtgccggagcatggcggaagaaatcctgtccgggaaagagtaaaataaacggggtgagaaacactaactgcatcaggaggaatcattatgacaacatcattaaatctgcaatttgaaaaaacggctttggtccttattgatttacaaaaaggcattgtgccgatggataaaagcggtaccgttgtgccgaacgcgaaaaaattaattgatgtgttccgggaaaaaggcggatttatcagctttgtaaacgtggattttcatgacggagcggatgcgctgaagccgctgacggatgaagaggcggcgggccattcggctccgccggcggattgggctgaatttgtgcctgaaatcggagtgaaagaaaacgattatacggtaacaaaacggcagtggggcgcgtttttcggcacggacctggaccttcagctcagaagacggggaatcgacacaattgtgttatgcgggattgcgacaaacatcggtgtggaaagcacggcgcgagaagcttttcagctcgggtatcagcaagttttcgtaactgacgcgatggcgacattcagcgatgaacagcacgaagcgacactcaagtttatcttcccgaaaatcggcagaagccggacgacggaagaatttatcgcacagacaaaatgacaatctccaaaaaaagccgcgtcctgtttttgacggccgtggcttcggggacgatgctgaacccattgaactcgtcgatgatttctcttgcgcttcacagtattcagcatgaatttcacctgtcgtttacaacggtgtcctggctgatatcgtccttttatcttgccagcgcggtggcgcagcctgttaccgggaagctcggtgatatgctcggcaggaagaagctgtttttgatcgggcttctgcttgttgccgtctcggcggtcggcgcgccgtttgcgccgacttttatgactttgctgatcatgcggctttttcaatcgatcggaagcagcgcgatatatccgtccggcgtcggattgatccgttcaaatatacaggagaagcaggcttcggcgctggccgtcctgtcaatctttgcatcagccatgacggcgctcggtccgactctcggcggttttctgatcgtttggggagggtggccggcaatctttttcgtcaatctgccgtttatcattctcagcttttttctcggaatgtatatgtttccgaaagatgaaaaacgcgagatcggcggcttgaaaggcgtgcttcgccagcttgatacgatcgggatactcctgtttgccggagcgattatccttcttctgtcgtttttattgtccttcagtacgaagcctcactatacagaaggcgtattcgggcttttgtttgtcgggctgtttatctggcgcgagctgaaaacagagaagccgtttatagatgtcaggctgtttaaaacgcaccggaaactatcgtcggtgtatattcaatttattttgctgaatatattcttttactgcatctttttcgggcttccgagctattttcaggatgaaatgcatttgtccgttcagacaagcggattgattatgctgtttatgtcgggcatgagtattctggtgtcgcccctgaccggaaaatggatagataagaaagggcttcttcagccgattgttgccggaacctgtctgaccgcgatcggggcggtgctgttaacgtttttctttcttcaggcgcctatgataggaaaagggctgatcctatccgtgctgggtgtcggctacggcttcggaaatgtcacgtttcaggcggccatgctgaaaacgagccccgccgacatggtcggaacaacgtccggcctgtttcagacctgccggtatctcggttcgattttgtcttctgtcattttgggcattcttttcggaaaagaaattacctccggccattttcatatgctcggcacgattcttatcgttgtcggcgccgtaagccttttgatggcgttccggttttcggttctcctcaaaaaagcctcttaacaggcgcaaaaaaaagagacgggctctccccgtctctttttttgtgtaatgtgctcaaaaattaaaacgattattgtcgacagcgaccaatgttatttacggaattttcagttatattttttcacatgtgatgtaaggaaaacgtacatgtgggagggagaaaatgaaaaaaacaacgagtgatcggctaagcaacaaagatttactgcctttagaagacggcgaacggacatggaaagcggtgaattttgcatccatttggatgggctgtattcataatatcccgacctatgcgactgtgggcgggctcattgcgatcggcctttctccgtggcaggtgcttgccattatcgtgacggcgtcactcattttgttcgccgctttggccttgaacggccatgccggaacgaaatacggcctgccttttccggtcattatcagggcttcttacggaatatacggagctaacattccggcgcttctcagggcgtttacagccatcatgtggctcggaattcaaacatttgccggaagcacggctttacacattctgcttttgaacatatggccgggctgggggagtctcggaggagattggaatatattcgggcttcatctgccgggctttctgtcgttcattttcttttggggcattcatctgcttgtgctgcggcacggcatggaatcaatcaaaaaatttgaagtgtgggcgggcccgcttgtttatctcgtcttcggcggcatggtctggtgggcgatagatattgccggcgggctcggaccgatttactcacagccgggaaagttccataccttttctgaaacgttttggccgtttgccgccggagtgacgggcattatcgggatatgggcgacattgattctgaatattcctgacttcacccggttcgccgcgtcgcaaaaagaacagattcgcggccagttttacggcctgccgggaacgtttgcgctgtttgcgtttgcgagcattacagtgacatccggatcacaggtagcattcggagaaccgatttgggatgtggtggagattttggcccggtttgataatccttttgttatcgctctttcggtcatcacactttgcatcgccgccgtctcggttaacgtggcggcaaacatcgtgtcaccggcctatgacttggcgaatgtcctgccgaagtatattacattcaggaggggagggtatttgaccgccgttttggccctgttcacaataccgtggaagctgatggagagcgccacgaatgtttatgcgtttctcgggctcatcggcgggatgctcggaccggtggccggggtgatgatggctgattattttatcatcagaaaaaggcagctctcagttgaagacctttattcggaaaccggacagtatacttattacaaaggctataattaccgggcctttgccgcgacttttctcggcgcgtttatttctttaatcgggatgtacgtcccggcgttcgccggcatctatgatatctcctggtttgcgggtgtcattttgtcatgtctcggttatacggcgcttatgtatattcatcctccttatgtaaaagcggcgggacgaatcgcgcgggaaagagcggccgaataaaaaaagccggggctgcccccggctttttgtcatatcagtctgcgattgaaacgtttccgtccgcttcaagcggcgttctttttttctggctccagccatacaggagtaaagcaatcaggacgaacagccccgcggccagataaatcgaatggaatccggccgaagcgacgaagaggccgaatacataagacccgccggcaatcccgctgtcaaagaaagtgaagaaggtagccgtcgcaaagcctgaacggtgtccgggcgagttctgaatcgccagcgtctgcatacacggtacgatagagccgtatccgagaccgattacggcaccggacaagagaagcatgagggcgctgtttgtcatcgccagcatgcaaagccccgcggagaacacgataatcgacggatagatgacgattcccggccccactctgtcaaacagctttcctgtgaaaggacgggcggccatcatcgtcacggcgaaacagacgaagaaatagccgctgacatccaacaggtggatcgtctttgcataaacggataaatatgaagtcacacttgaataacagaaagaaatggacaacccgacaatcgcgattttaagcgcgcctttttcaaacatgtcggagaaagaaaaacggaagacagtcgttccgctgttgttttgatccggcacacgaatcataaaagcaatcagcaagcctaaagaaacaaatacggcaaaaatcgtaaagaaaaccgggaacgaaatgaccttcacaaggctcagcccgagaaacggaccgatcgccatggcaaggttcatagacatcgcgaaataaccgagcccctcgccgcgccgcttggcgggaataatgtcagcggcaattgcgcccgtaaccgtcgttaaaatgctgaaccagatgccttggaaaaaacgcagtccgagcagcagatagaaattgtgtatcggcaaatacagataagaagacagggcgaacagcgccaaggatacaatcgtcattcttttcttgccgaaccgttcaataatcgcccctgaaaaaggacgggtgataatagcagataacaggaacaggctgatcaaaagccctccttgcgattcactgccgccaagctcctgaatcatatagataggcagcacggccaaaaatgtataaaagaacacaaagacaaataaattcacgagtacgaccataataaaatctttggtccagatcgagtcagatttactcaaaagtacagcacttccctttttattatttcgttaaaaacacattcagaaactcagaaaaagcttccttatctccatcttggaaatccgcaagcatgtcttcctcgaacttcagcatctcttgattgatgctgtcgtatttcaattcagcttccttcgtcaggacgacgagcttttcccgcttgtcttctccctgttcccgctgaatccagccgttttcttcaaggcgtttgatcgttctggtaacggtcggcgcctcaacgttcagataggaccagatttctttttgggtcatcggtccgatcgtttttaagcaatataggattgaccattgagaggagtacaggccgaatggttccagccgttcattggctttcttcgtaatcaggcgggcgcattgattgatttgatgaatgaggcgtctgttgacgtggatcatttccgttctccttttcaaaaaacttacctaagtaactaattgcgctgtttcattctacagcaggatcgcgcggatgtaaaccccccgatcaaaaagcagaaaattatgacccgccccttgtccttattgagtttttagcatattcccaattcattgctaatacactgttacaaacctatcaaagagagtgtttgaggtgagggatcgtgggcatatttctaaaaccttcttatataatcggacaacgaagaagctgcatcatcagtgaatctgttacagaatacggatctcatttcacacttctcacatccaactggggaggtcgagtggtgtgcacgattacatcaaagagcgaacaatcaagattggtaagtatatcgtggagacgaaaaaaaccgttcgtgtcattgcgaaagagtttggtgtttccaaaagtaccgtacacaaagatctgacagagcgcctgcctgaaatcaatcctgacttggcgaatgaagtaaaagaaatactcgattatcataaatccatcagacatttaagagggggagaggcgacgaaattaaagtacaagaaggatgaaattcttgaaggggagcccgttcagcagccgtagcgcctgacgtctgccgggcccttttttctcctcccgggcggtttcgcgaatatccgcaaaattttgtcaagaacttatatcgttcagcagcttttttttgataaattatgataatatatataattagggcacaatgtggatattttactgtgaaacagatatcaaggaggatataaatagatgtttgcaagggatattggaattgacctcggtactgcaaatgtactgatccatgtaaaaggaaaaggaattgttctgaatgagccttccgttgtggcacttgataaaaacagcggcaaagtgctggctgtcggtgaagaagccagacgaatggttggacgtacacctgggaatattgttgcgatccgtccgctgaaagacggcgtaatcgcagacttcgaagtaacagaagccatgctgaaacatttcattaataagctgaatgtaaaaggacttttctcaaaaccgcgcatgctgatctgctgcccgacgaatattacatccgttgagcaaaaagcgattaaagaagcagctgaaaaaagcggcggaaagcatgtgtaccttgaagaggaaccaaaagttgccgctatcggcgcgggtatggaaatcttccagccgagcggtaacatggttgttgacatcggaggcggtacgacagatatcgcagttatttctatgggcgatattgtcacctcctcttctattaagatggctggggacaagtttgacatggaaatcttaaattatatcaaacgcgagtataagctgctgatcggtgaacgtaccgctgaagatattaaggtgaaggtcgcaacggttttcccagacgcacgtcatgaagaaatcaccatccgcggccgtgacatggtttccggtctgccgagaacgattacagtaaacagcaaagaagtagaagaagcccttcgtgaatcagttgccgtcattgtgcaggccgccaagcaggttcttgaaagaacaccgcctgaattgtccgctgacatcatcgaccgcggcgttatcattaccggcgggggagcgctgttaaacgggcttgaccagcttcttgccgaagagctgagggtgcctgttcttgtcgctgagaacccgatggattgtgttgcggtcggaaccggcgtcatgctggataacatggacaagcttccaaaacgcaaactgagctgatgataaaaccccattctgaaaaagaatggggtttttttctgtcaaacccttcacgaacgggaatgtaaatccgataataagaaaaaatgctgattttcattatagaacaaatgttccggtgaggcaactggaaataatgctatttcagaggtggaagacttgttaaaaggattatataccgcaacgtccgcaatgattacacagcagagaagaacggaaatgctgtcaaataacatcgcaaacgcgaatacatcagggtacaaagaggatcaaggttcaatccgcgcctttcccgagatgcttctgagccgaatagaaggcgacaaaaaaacgaaaatcggttccgtcaacacaggcgtatacatgcaggagctgaaaccgttgtttacgcagggaagcctgaaaacgaccgatcagccgacggatatcgcactgatggagaatcaggttcccaagaatgccgaaacgaatgaaaacgccgagctgttttatcccgtgcagaccgcaggcggcgtccgctattcaaaaagcagcactttctcattaaatgaaaacaatcagcttacgataaacggaaaccttgtgttatcaacaaacggacagccgattacagccaacaatgaaaaattcaccgtatcagaaaacggaacggtcacgacaaacggccggccggcggggcagattgacatcagaatggaagaagacgtgcgcaatctgaaacgggacggcaatgacctatacagcacggccgacggctctgaactgccgagcgcggcggcgaatccccaagtctcgtattcattaaagcaaggcgtctcggagctttcgaacgtggatgtgacgagcacgtatacagaaatgacggaagcatacagatcatttgaagccaatcaaaaagtcattcaggcttacgataaaagcatggataaagccgcaaatgaaatcggcaaagtgtaacaaaatgggggacattcaattatgatgctcagatcaatgctgacggcttcaacagccttaaatcagcttcagcagcagatggatacagtcagcagcaacctttcaaacagtgatacgacaggctataaagcgagggactcccgcttttccgagctgatcagacagcagtatgaccatatagatgacaaaaaggaaaattcgccgaacatgcggaaaacgccgcccggcctgcgtctcggcgccggaacggtcatgactccgcagctggactcagggcagggaagcatcaaaaaaaccgaccgtgaccttgatatcgcgttcacatcaccttatcaatatcttcaggcagaagcggacggacggcgggtgtatacaagggacggctcactttccctcaagccggccggcggaaatgaccggctgcttcagctgatgacagcgggaggcaatcccattctcgatgagaacggtcagcccatacaaattgacagttcgctgactcagctgaaaatcagcaaaaccggaacgctgactgcttcagaccaggcgggaacccgttcgcagacgtttaatctcggcatcgtcaatgtcaataatcctcaggcgcttcatgcggaaggggataatctgttttccgtaaacggcgcgggggcttcagcgattgaagagcttaccggcgcaaaccggcaggcaatcggcatggagcagggcgcgcttgaaggttcaaatgtcgatatgtcaaaagaaatgaccgacttaatcgtgtctcagcgttcctatcagctgaacagccgcacgattacattgggagaccaaatgctgggcttaatcaactcagtcagataaaagaaggggcgttttgatcagccgcgcatgataaaaaatgcggctttctcaaaatcgcccttttttttgtagtaatcagtaatatcctgaagcagcacttccaaatccacccacgcttcaattttctgcagctccagcacgagcttctgcaatcggtcgtacgggtcctcctgagcggtgtacaatatgttgagcgcggtcagcttcaatttcataatcttgttctgcactttttcagatatgtataaacctttctgcagcacggtttgtccttcggcgtcagatccggttttaaaaagtgctctgaccgcttcgtatacacaatgcaggtaggaaacgggagactctttctcgaaacgctgattgcccaatacctttttgtaaaaagggagggcctctttatcttttttctgggctgtctttaaaaaaccaaaattataataggcgtggcacagcaggttattgtcattgatccggtccgttatctttatggattcattaaagagctgttctgcgtcgtcatagcgtgcctcgtctatataattcacggcgagaagcagccggcagctgagcgtttttttgatgtagccggcttcatcttgatagatttccagcgctttattgacatattgaatggagagcgcaggcgacttcatcatgtaatatgcacccgctgttttataataaaattcagcggcttcgaaacggtcctgaatggccggcaggtactgttcagcttctttaaagcggcagacagcacggttcggagcgccattcaccatatggaataatcctttgaaaaaatagaaataataagttaattcatgatccatctcatctttgcgccgcttcagctcgcagaacagcttattcagaccgtcttttttctcaaacagcagctgaaaccgtgcgaaaaacagctgatatctgagtttgagctttgcattcttttgtaatttggggagatgctgattgatttgttcgtgaagggaacgggctagatcgaattggcgttttcccatggcgtcataccactcattcagcatcaccagcgtacgtttttcagtaaacttagcaatcatcttccaacctctttgcatagggtaaaaatctttatttatcataacacattaatggacgaggctcattgccagctggttacagtttacagcgcggttgaaaaagaaattgattcataatatacttccaaatgtacagattggttgccacatatgccttctatacatactattgtcgatgaaggagatgtcaagagaatgcttgatactcagcaaattaaagaaattattccccatcgctatccgtttcttctggtagacagaattacggaagtcgaagaaggaaaacgggcggcgggatataaaaatgtgacggcgaatgaagattttttcaacggccattttcctgaataccctgttatgccgggcgtattaattgtagaggctttggcgcaggtcggagcggttgcgatgctgattaaagaagaaaaccggggcagactcgcattttttgcggggattgataactgccgtttcaaaaagcaggtaaaaccgggtgacaagctggagcttgaggttgatattacccgcgcgcgcggtacgatcggacgcggcaaaggcgttgccaaagttgacggcgagctcgtgtgtgaagctgaattaacctttgcgctcggagaataaaaacaaacaaatgggcttataaaaaagcccattttgtatagaaagaggtgaatgtaatgtggtcagaatttaaaagctttgcgatgcggggcaatatcatggatctggctatcggtgtcgtcatcggcggcgctttcggcaaaatcgtgacgtcgctcgttgaagacatcatcatgccgctggtcggcctgcttcttggcggtcttgacttttcagggctggccgtgacattcggcgatgctcatatcaagtacggaagcttcattcaaacgattgtgaacttcttcattatttcattttctatttttatcgtgatccgcacaataggcaagctgagacgtaaaaaagaagcagaagaagaggctgaagaagcagaagaaacagatcagcagacagaactgctgactgaaatcagagatctgctgaaacagcgggctcctcacaatgactagggcacaaaaaaaggctggatgattaacgtccggcctttttcatatgattataatttttgtttaaacgcttcaatcagccggctgcccgagtagccttctttcacgagcgactccagaatgctttctgatccggggtggtttcttgacaccatttgaccgtaaattaaaacttgtatactcttttccagctccacgatatttttgatgcttcccgtcagctgggcggggcggttgctttttttcgtaatcgttacaaacaccttcgcttctttctggcttttcatcagcatgttaaaaaaagacaagtgttcggccgggaccagtgcttcaattaaccaatgattttctccgtcctctttgttaataatcaatccgtctaaaaggggaaactgttcaatcggctgatcgtctttatctaaacgttccacattcagatcaaccagtttaaaggttttcatctcttattttcacccctattgtccatgtttttcgttcatttattataacacatatcatttttcccgggaaaatgctgtaagacatgcttcatcatttttgtaggcggtcaacatttaatcatttctattttttcattataatgtaaaagaatatggtcatggagagatgcttatgaatcaattgcgcctgaaggaaatctatatagaagacggttcaaggcgaaaagacgatcattcctacttggtatgcaaaaaggaagattgtgaggtgcatcttaacagaaggggaaatgtcgtctttttatatgaaacaaaagaccgcatggaacagtataaaattcagctttcactgactgataaaaagctgagtttttactggttcgcatgggacggcggaaagtttgtccgcatgtttgagaaagactggcttaaaacgaaacttttctcgcggctgctcaaaaatacatattacataagcggtcaaaaacaaaagttttttttatcagaaagaaaaacgaaaacataagagcagcctgaacgaataacggctttatccgctttttgctttcacgagcccttgtactacaatgaagccagcctcgaaaaagagaggaggagacggcttgtttaaccacgttatgcttgtcggccggctgacgaaagacccggagctccgttttacatcagcgggcattcccgtcgctcatattacgttggcggtaaaccgcaattttaaaagcgcgtcgggtgaaaccggaaccgacttcgtcaactgcaccatctggaggaaaaacgctgaaaacacggcattgtactgccaaaaagggtcaatggtcggtgtaagcggcagaatccagacgagaagttatgaaaagacagacggcgtaaaagtttatgtgaccgaggtcatggctgataccgttcggtttatggatcaaaaacggaaagagccgctggctgaatagcatgcttttttcctcgatttcccgcctttcagcgggccccgcaataccaccttcccactcgccagtcgaaagactggtttttttgtgcgggagctgaaaaatggttaaaaagaagtgatttcgcttatgaatacttaaaaacattgaatatattgggataaaaacttataattacttacagataagtgacgaaaaagggaatgaggacgtgtatcaagaagaaagactgattgcgataatggaatatttgaaacagcatcggcggattaccgctgaacagatatgttcgctgcttcatatttcaagagataccgcaagaagggaccttgtaaagctgaaagagcgcggggccattatcagaacacggggcggcgcgattctgccgtcggtgaatcaggaggttcctggctattcgggccggctgaaaactgtttctgaagagaaaaacaaaatcggcaagctggccgcatccctgatccataaaggagaccggatcattctggacacctcgacaaccgtgcaggcctgcgcggagcatttaaatgtcaccggctgcactgttattacaaattcgatcaatcaggccgatatcctttccgcaaaagagggaattgatattcatctgctcggcggaaagctccagaaggaacatcggtttttatacggggcttccgtcgtagaaaaactgggggattatcacgccgataaggtgctgatcggcgttgtcggcatctcggaaaacggcctgacgatcccgcatgaagaagacggcatggtaaagcgtaaaatgatccgacaggcggaacaggtgattgcgctgagcgatcactccaagcttggccgtacgagtttttatcagtatgcagacctgcacgaggttgacctgctgattaccgatcggctgcctgatcaggatttttgcgatctgctcgaccggcacggcgtagaattgcttgtaactgaatctgaagaagaggatgaggacatgtgaaactgattgccatagatctggacggcacactgctgaacagcagtcatcaagtaagcgatgaaaatgagcgggctttaagggaagcccggcaagcgggaattgaaatcgtggtttccacgggacgcgcgcattttgacgtgcactccatcttcgaaccgctcggcataaaaacatggattatcagcgcaaacggagccgccattcatgctcctgacggcagcctgtaccactgtgatgcgattgcagaaacaagagcccgcggcattttgtcatggcttgaagagaatcaatattactatgaggtgtttacaaacaaagccatctatacgcctgaaaccggcaggcagctgctcgatatcgaaatggaccgggtgaaaagcgccaatccggaaaccgatctttccgttttggaacaggcggcttcagtgcaatacagccagtccggctttgcttacattcattcataccgtgagctctttgagaaagaagagcatctggatttttataatattctcggattttcgtttgatgagcggaagctgaaagcgggctgggaccgattcagcggtcagaaagatctcacccttgtcagctctgccgatcacaactttgaactggcgtctcgaaacgcctctaaagggcaggcgctcaaacggctggcgcaaaagcttggcattccgatggctgaaaccgccgcggtcggtgacagcttaaatgactattcaatgcttcaggcggccggaaaaggcatagcgatggggaatgcgagagaagatattaaagagatcgctgatgccgttacattgacaaatgatcaaaacggcgttgcgcatatgatcaggaatttactgtgaaaggtatggcgatactgttcatgactggcgtgacgcattcatggcaaatgcggcgtaacagtaaggacgacataaaagaccggctcttctgagagagccggtctttttgcgtttaatgtgattgcgctgatgcgctgagggtgaataattcttcaagctcagcggatgacagctcggtaatccaattttcactttggataatctgatcgttcagcgtttgtttcgtttcgagcatggcatcaattttttcttcaatcgttcccgtcgtaatgagtttgtgaacatggacgaaccgttcctggccgattcggtaggcgcggtcggtcgcctggttttccaccgccggattccaccatctgtcatagtgaatgacatgattggcagccgtcagattaaggccggttccgcccgctttcagtgacaaaatcagcgtcgggtattctttcttctggaaccgttcgacgagagaatcgcgttcctgcttggataggcttccgtttaaaaactgaaccggttctccgaatgctttttccaggaggcgcttcatcatgttgcccatctgaatgtattgggtgaaaatgaggcagctttccccttgtccgcggatcgccgccattaaatcaagcagcttttccagtttgacggatctcccgtttaacagctctgtctgttcttccttcaaatagagcgcgggatgatcgcatatttgcttcaagcggccgagcatgctcagaatcagcgctttccgctgcatcccggtcagagaagccatatgttcaaatgtatctttgacaagctgttcataaagggatgcctgttcggctgagagcgggataaactctttttgttccagcttgtcaggaagattaagcgctacttcttcatcccgttttgtccggcgcagtaaaaacggccggattaactgctgaagctggttgattcttttttcgtcacggtctttttcaatcggcagcacatagcgtttatgaaagccggtcagactgccgagatagcctttgttcataaaatcaaaaatcgaccaaagctctgtcaggcggttttccatcggtgttccgctcagcgcgatatgatggacgcctttcagctttctgatcgcgcgggactgcttcgtatgcgcgtttttaatattttgcgcttcatcaaggcagatggtgctccatgtcacggaagaaagctcttcctgatcggcgtgcgacaggccgtaagaagtaagaacaacatccgcgtcctgataggccgggacaaatgcttcccccttcggccggcgggggccgtaatgaagcatggccttcagctgcggcgcgaaagtctggagctcacgctgccagttgccgagcacagatgtcggcgcaatgattaaggcaggcgctttttgccggccgctttccttcacatggagaaaataagcgatcatctgaatcgtctttccaagtcccatgtcatctgcgagacaggcgccgaagccgtttttccgtaaaaacagaagccagttcatgccgtacatctgataagggcggagctggccctgaaacgcggcgctgacttcatgctccggcagatcccgggcttccgtcagtttgcggatcaggcttctgagctgctttgataattcgatcttgatcccggcaaatgccgatgagtcaatgatgtctgtgtcctcggctccgttttccccgtgatccatcagttcgcgcgccagcacgtcggacatgtggaggccctcagattccgctttttccatcagttttttcatttgtttaatgaattgaggatcaattttcacccattggccgcggatgttgacgagacgtctgttgtttgcgacgagctcattgaattcatcctctgtcagctcaattccgtttgtggcgaatctccagttgaaatcaagcagagcattcatgccgacgaaggactcgccccgcggggaggatgacactttcgctttgagcatcatattgctgtcccggacaatctgccaccatgatgggagaagaatctccacacccatatcgacaagcgtctcactcgcttccgataagaagatccaagcctcttcttcagaaatcagcgtcgttcctgaatcaaacgaaagccagggaaccgttctgcggaagcggtcctgttcgcgcgcgatttttccgccgtatgcctgccacgcttttttcagtcccttcagtccgtcgaaaaaggtgatggagccggtttttttctcacgtaaaaacatttcgattttccagtcgtcaccgtcaaaatcaggctcgtttaatcggagcccgacggtaaacggcgtcagatcgtcatgccagccgattccctcgagaaaatcatcttcatccaaaaaggagcctttaaacgtatgaacggccggtgagcgggtttcgatctgccgccatttttccagcaggtcatcattgtactgaatgtagtcctggaccgcggctgagaaccagtctgccgtaaagccctccagcaaaagctcgcggtctttgaagcgcaggacaccattttgccaagcctcataatccggaagaaaatcgccgtcggcaataaattcgtatatcgtcgaagccgcttcaattaacggttccgtttcctttgtcagctgcacggtgctgaatgaattgaacgagttttttccgagcagctcgacggtcatccacgggctgagcagaacggccggggtgccgatgaagctgacgtcttcaagaaacgttccgtaaaaggtggactcatgccattggaacaaatgagtcttcatctgactgagagtaagcggctgctccttctcatcatggcttgacagcgtaaatgtccaatcttccatttgttctacatgaatgaaaatttccttaagactcgccatcaatcaactttcctttctgcaattcttcttgaagggcgcgcagcctcttgtaacttgcgctcagccggctgatataccgctcccatacctgctgtttttttgcctttttataaagcgtccgcagttttttcagatggcgtgcagcctctttataggcgctgcggtttttttgatcgataaaaaaggccgccgcccggtgataggaggggatgagcgcttccggatcactggcggcaatttccttcaggatgtccttttcgatttcccagacggaaaaaccgacgaggctgtgaatctccacccactccgcgtaccgccgtttttcgtacaggtactggctgtattcggtaaaggtatagggaaggcagccggaagcaaaccgttcaaacagctgatcatcccgtgagtgccgcgcataatccgccaatagcgcaaacagctctccgataatgtcgcgcatttctttaaacggcttatcaagcttcgtatagttcacggcaagcggctcgatccggccataccatgttttcagccgtttccagtcttttttcgcggtgagttcaccgagccattgaaaggtatacggcagcgcttcaggagggaagcgggacatatcttcaaagacagattcatcatctttttgtaaaaaggccagatgaagccgtccgaaccgcacttccggtgaaaaacggcgcccgctttcctgtgcgagaatctcctgttcacgcgcgacccatttcggccggttcaaaagcgcgctccacatttcaccgaatacccggaggcgttcgtattgaaaaagctcttctttcacaagcagtctgcggagcaccggaggcgtccggtctaaaaaaggatcgagtgaaaaagacaaggcgtacgttttcagtctgtcaatggaggaataaattgtatccatcagctgttccacgtatggattgatgctgtaataatctttttcggcatccaatctgcctgactcaatcaaagtgaacatgtgaagccagacggcaagcgccgaatgaatctgatataagcttttaagctcgggttttttcggggcgtgctttttgagcgctgacagatagccgtaataaaggccctgcatcgtctggcttccggccggcgtccgcgcctcccacagcgagaattccgaatcaaaaaaagcgagccagcttgacagcgactcttcattcggcagcactttttcctgaaactgccggcggacaagctccctgctttcctcaagcttttctctttccagccaatgttcggtaaaggtaccgacccgctcgaattgggcatatacgtaaagaaaaacggccagcacgtggcggcagatcgcctcagacgggcatgcgcagccgcttttcaccatgaaaaataagttcagcgtgacccttacaggcacaacatcctgcacatatgcggaaatctctgtcggggtttgaacctgtatacgatagacggaatcctgccgatataaaatgagtgctttcttcatcagctgaacattgtcttcattgtaaggaagaagttctttaagctgttcagccgctgcgagcacatcttctttagcaatcatatcctgaagcatgattatcgctcctaacgagtcacaaaataaaaagattccaattcctctattatatcgcaacacatggctcggaaaaagtttttcctaaaaaaggacataaaaacccggatgtgtcgaatgatgtattagagattgcaaaacagcacccgacagcatataataatcttgttttcaatttaatggaagccgaaaggaaacgaatgatgaagaaaacgaagttagatcaagaggagtttctgaagattttaatgcatgcgcacgacattggtgagcagtcctctgagatgaccacaaaagaaatgcttgagaatttgatttcttatattaaaaatggatatgcaacataaaatcccgcaggctcttgaccgcgggattttttaatcttcctgtaacaccattgtttaaagcgcttacaaaaataaaacgaattgaagtgattgtctatttttgtcgaattttgtcatttgaaaaggttagaaatgacagtttaaagctgtataatcataattggaaaagatcattggagggaatgggaatacgcggaaagtgatatggaggttatatgggagaatctacaagcataaaggaaatattcgcaatactgagaaagcgtctgctgtttatacttattattaccgcggcggcatctgccgcaggcggactcatcagtttcttcgctcttacgccggtctatgaaaactcaactcaaattttggtcagtcaatccaaaaacaatcaaaaagaagtccaattcaatgacgttcaaaccaacctccaattaatcaacacgtataatgtcatcatcaaaagcccggtcatcctcgatgaggtgattaaacagctgaatctgtccatgacttcgaaagagctggaatcgaaaatcacggtgtccagcgagcaggattcacaagtcgtgacgattgccgtgagggatacggatgctaagcgggcggccgttatggcaaatgcggttgcagccgtttttcaggacaagatcaccgccatcatgaacgtggataatgtcagcatcctttcaaaggccgaagcggcggacagccagtcaccggcagagcctaaccgtaagctgaacatcgcgattgcgtttgccgccggacttttgggcggaatcggtctcgcctttttgctggaacatctggataatacgatcaagtcggaagaacagctggaatcactgctcggcatcccggtcctgggaacggttacttcaatcagcactaaagacagcgttgccaaaaacttgaggatggcggaaaccaaacaagcggggggcggacatgttgacgcgtaaaaaagacaaactcggaaaacgaagcgtgattgcgatgtctgagccgaaatccatcaactcagaacaatatcgcacgatccgcacaaacattgaattttcttccgttgatacggaggtgaagtcccttttgatcacatccgccggtccggaagaaggaaaatcgacaaccgcggccaaccttgccgtcgtatttgcacagcaggggaaaaaagtgcttttaattgatgcggatctgcgcaaaccgacggttcatttcaccttcaaattggacaacggaaccggattaacgtcgctgctgttaaaacagatgccgtttcagaaagccgtcctgccggctgatgaagcaaacctggatattttaacgagcgggccgatcccgcccaatccggcggagcttttatcgacgggtgccatgaaagatcttctgtcagaagccggcgcagtttatgataaagtgattttggatacgcctcccgttttggccgtagccgatacgaaaatattaggcagttacactgacggggctattatggtgatctcgagcgggaaaacggacaaggaaaaagcggccaaggcgaaagaagcactcgattactgcccgtgcaagctccttggggccgtgatgaacgggaagaaacaaacgaaacattcggactacgcctactacggacaataatgtcacaatgggcgcggtccattctttttaaggagggattgaaatatgatagatatccattgtcacatccttccttccatagacgacggcgcggcggatgatacagaaagtctgaagatggcgagagaagcggtcagacaggggattgatacgatcatcgcgacgccgcatcatgtgaaataccgctatgacacggaccggcatacggtcaacgaagcggtcaccctgttaaacaaacgtttgaacaaggaaggcattccgctgactgttctgcccggccaggaaatcagaatagacggagatctgctggcaggtcttcaaagcggctcgcttgtcccgctccataatacgaagtatgtgctggcggaatttccggcggatcatgtcccggcctacgctgaaaggctgttttatgaactgcagctgaacggatatgtccccatcattgcccatccggagcggaacagagaaattcgcgaaaacccttccgtcctatacagtcttgtgaagaaaggcgcggccgcccaagtaacggccggctgcattgccggagcattcgggcggaaagcgaaatccttttcgctgcagctgattgaagcgaatttgatccactttctcgcatctgacgcccataatctcggaccgagaaatttttattatcaggaggcgctcggcgttctgaaaaaagaagcagggacagagctgatttacatgttcacggaaaatgcggcgcttctcgctgaaaacaaagccgtttataaggaacctccgctgcctgtggcccgccgtaagcgctggggtcttttttaatcgtcgtctccatcccgtttaaatgaagcgtaagcggctgttttgcaagatgattcttttatgcttatgctattatcagcggccggcaccgttttttcctatcatgacctcaggcttccggcattcagccggcgccgggatcatatgataataacggtaagctgcccagcagcaatttctaaacggttgggggaacacgatgaaaataacagtgatcggaacaggctacgtcggtcttgtgacaggagtgtctctttcagaaatcggccatgacgtaacatgcatagatattgacgaacgtaaggttgagcagatgagaaagggattgtcccctatctttgaaccgggccttgaagatatgatgaaacgaaatatcggccggcatcggctggcatttgaaacaagctacgaaaaagggcttgcggaagcggacgttatttttatagcggtcggaacgccgcaaaaagaagacgggcacgcaaaccttacttatattgaaaatgtcgccgaacggattgccgaacatatttgtaaagatgcgattgtcgtgacaaaaagcacggttcccgtgggaacgaatgacaggatcagcgaagttattcattcacggctgaaagcggacgtgaacatttcaatcgcctcgaatccggaatttctccgtgaaggttcagcgattcacgatacctttcacggcgaccgcatcgtgatcggggctgaagaccggcagacgcgggaaacgcttgaccgggttttcgcgccgcttgcgattccggtatatcatacggacatcagaagcgctgagatgatcaaatatgcgtcaaacgcttttttagccgcaaaaatcagttttattaatgagatttctcatatatgtgaaaaagtcggtgcggatgtggaatcagtcgcacacggaatgggattggataaacggatcggcaatcaattcttaagagccggcatcggttacggcggttcctgctttccgaaggatacaaacgccctcgtgcagatcgcgggacatgtggagcatgattttgaattgctgaagtccgtcattaaggtcaacaataaccagcagtccatgctggttgataaagtgctgaacaggctcggcggtgtgacggggaaaaccatcgcgttattagggctgtcttttaagccaaatacagatgatatgcgggacgcgccgtccattgtcattgcggatcgtctggcggctcttgatgcccggatgacagcgtacgatccgattgcttcattccgggcttccgggctgcttccggctgcggtttcctatcgggagtccatagaagaagccgtcaggggagcggatgccgtcctgattctgacagattgggaacaaattaaacacttcccgcttgatgcgtacaaagagctgatggaaaccccggttattttcgacgggagaaactgccactcgcttgaggaagcggaacaggcgggcgtggaatatatctcaatcggaagaagagccgtcgtgcctcagactgattctgtcacttgaaaggccggcggaccgcgccggccttttatcatacaatcattagagacgaaggagatattaatcgtggaaaacacatggaaattgccgaagcaaatggaatcatcccgcggtctgctggaaacgtcagcacggcgctttattaaactgcacgtcaaaaaagctgaaacgggtcggtatgacagtaaaattgccggagacccctattttccgaaacatgaaccataccctgaagatgaaagcggcaggccgatgaagcttctcgctcaaatcaattttgcggatatgcccggacttcctgattttccggacaccggcattcttcagttttacatatcggtcagtgatgacgtatacggtttgaattttgacgacgggtgcgcgcaaacgggtttctgcgttaaatattttgaacatgtgacagcagaagaagcggagctcatggatgatttttctttcgttcaggttgaagaggagtacgattttccgattcaatccgaagcgctgatcacccctgagctgtctgctgaatgggtgctcccgtctgattttcaattcaggcagtatgccgggatggatgcctttgactatttcgagcattttgacgatgaggtgtatgacgaatatacggcgaacgcattcggccataaaatcggcggctatgcgtccttcacccaggaagatccgcggtcttactcccatcaaaaccatacgattctgcttttgcaaattgattcagatgatgacattgattcgatgtggggagatgtgggaatcgccaatttctttatcagaccggaagatttgaagaaaaaagatttctcaaacgttttgtacaactgggactgcagttaacgacagtatgatgatcatgatacaaggcaaaggagacggttcatcactgtctccttttttttagggaatttatcatggatacatagaggagatcaatgaatggatatgccgtttatgtgagtcttttggcgttaatgatgaacatctcggctgctgaaaataagccatttaacctatttaagccgctttctgtctattttaaaatataatatatggaaatatagtatggaaaagtctgtgctttttgtacgactttttgcgtaagacgaggtgaaaaagatgagccattcaagcacattaagccatattaacagcacaatcagccataaactgggcgaggttgaagaccaaattgataaattaaaagaagcgaaaagagagatagaatctctgcaggaagagggcgtgtctgaaatcagggacatcctcaggccgcacctggatcatcattggaccggcacttttgctgaagaatttgatgaccggcgcgatcaggcccatacagaagcatacagaatcgttacagacaaatacgacggttatatttaccgaatcggcttaaagatgacacagcttgaaattgaaaaaggagggctccttgccgccagaagcatcgcgagagaggcagagcacctgctgacgctgggagaagaagcccttgacacagtcggagaaaaaatacaatcaatcaaaagaagctggagttggttttaatggcagaaataaaactcaaatacggagctgtcatgaagcagcttgaatccgtcagcagcgctttggaggccgtttcggtcgggaacgccggttcaaacggaaaaaacaagctcgactatacctccaaatatcaatcccgcgaggcaaagcttgtatcgatgatcagcgaatacaagcaggccgttcataagaatatcgcggacgttaaagacaacgtagattctttgaaagaacaggacgaggcgatcgccgtaaaataacgaaagaaaggacttgccgatgagcaaagtgtttgaatcacaatcgttaacggacgaagcagataagagaaagaaacaatacgaagcccttgaagagcagctgcgtgcgctcaaacaagcctttcaaggcgtggccgatctgggtgatgctttgaaagggaaaggcgcagacaatataaaagatttttttcagggacaagcggaaatcgccgacagctggctgacgcttgtctctgctcaaattgcgtttttaaatggcatttcaggtgacattaaagatcaagaactcagcgatacatatgcggagacttcatttttggagcatgagctgcccaacgcggatttgaaagcttcagagattgtctccgctcataaagcagaaatcgattcaattttgtcaggcatcagcgatattattcatctcgacacatatacgctggatgattacgctgataaaatgggcgatgcccagaaaaccagacgcgatacgatcacggcagtcgatacgcttgatgaatccctgaccgctgaatatcaaaacttagaatctctggacaacgcagtgctcagcaaatattccgttctcatgcaggccaccagcaacgggaaaagcgcatcccctatgtactatgacaaaaaagccttccacagcaatgaaatctacaaaagcgtcatggcgacagaaaaacagggcacggactatattgacgcaaaagcccagcaggccgaagcaagacggcttcaggaaaaggctgaagaagaagccaataaaccatggtacgaaaaaacatgggacggcatctgcaactttaccggcgaagtcaccggctattatgattataaaagagcagccgaaggcgttgatccggtgaccggcgaaaaactctccaccgcagaacgcgtcacagcaggagcgatggccgccgccggattcataccggtcgtcggctgggcgggccgcgctttcaaaggcggaaaagccatttacaaaaccggaaaaaccgtcattgccgcagaacatgctttagatgcctataaaaccggaaaatccttagacattctcaaaatgacagaaatgggcgcatacggccttgtcgcctcaaacggattctcagaagccgtcacaggcagagatatgttcggaaacaaagtgtctgaggagaagcggaagcaaggggcgctggaagctgcgctgagtttggttggagcgggtgcattggcgaagcatgtaaacaaaggcataccgcttgcaaaatcgccacaagcatcaaaagttgaaaaagggaaaaagattctagaccaagtaaaagaattcaaagtaccgacgaatgtaaaaattcgtgtccacaagactgtcacaccggatggcgcaactttcccaatcattcatgctgatgtgaaaaccaaagctgtgaaagatcttgggattgtgaagatggctggtagtggtggcgggaatagtaagaaacttttcggtcaaaatggaactcaaattgcaagtaagacaacatggcaaaatgggaagacagaaagaatagacattgaaaacccaaatccagggcaaagagaaggtcaaattcactatcacgagccaaacaataaaaaatggtattttgatgtagaaacaaaaaagttttatgaccaaaaaacaggtgaagatgcacctagcaaaattcaaaaagtacttaaagacaagagtgttcagaaagctataaataagggattgaaatttttaggtgaggatcctgtattttagtataggagtgaagattatatatggaatatacaaataaaaatatgaaaagactaaaagaacgacttgaagatctgagcaatgcaaataaagttgacctatctaatttaaaggatattatttcacctaatatagttaaagtagacgattgctatattctagatctagagtatgagttaactgataagacaacgataaattggaatagaattttgaaaatgtacggggataaaacggggtatgaagcatcgtgtaatgagctccgcataaacgattatttagactacagtgatttgtctgatgaagagatttcactttatgcgtttcagatagtagacggttgggaacaacatttaaaagaaaaatttcctgaacataaatttgttgtgattataagtattgatgaaggttttgcgacacttagattttataaatatagagaagaggaaagcagttggctaaaggccgacattgaagagtacggaaacgaagctatccttgtaaaagaaattaactttgataataaaatttaagtaaaaaagcaggtagttatattgtacctgcttttttagtttttaccttttgaaagcaaaaaacattacaaatgatcaagcttttacaggattaatggtaaaactaattcaaaactgttgatttatagagaaaaaaattaaagattaagttttgtgaaaagtgaaataaaatgattcgaaaatgtaaaggagagaatgtaatgtcgcaagaacagaagttaattatattgaatgaaatgtttaaaaagaaggcgatgaagaggacgttgaagggttaacaaacaataatgattgatggggttatcaagcaagtttttaataaaataaaaaatgaaagaaattttaaaagtaataatgaagttatgagagatattatttttgaaggaattaatagtatagttgaaaaatcttgaaggttttaatgcaaaatagaaacgccttcattatctcttttatatttcacatggatagctacggaaactctggttaacggatggaaaaaaagctgctgtccactctacaaaattcccaaatgagcatcaagctggtcatggaataggttcaacaacaaacacccaatttaaagggagaaaaaataataggctagaatttactaaggtaaaccatgaaaatagtttaaaacaaaactaaagaggttctgttaatggtaaaatatgttaagttagatgttccaaaagcaaatttacatcccctaagaataacacaaggttggaaagtgaattataatcattttgttgaaatagatccaagaactttagaaccgaatgatgattcctggtttttgttcacagacagtttgttgcagctttatcatgaacaatcctcaataacgcttgatttaggctgggttcctgacatttcacctgaaggtaactatctggttttaatagtcaaaaataatgattgggaagatcctattaaagaattttcatcagatgattataaaaaagtaattttatatattgaatattatttaaaacaagtaacaacaacttggtggaagtagttaaataataatggctggaatagttcgaacatggaatcagatttattaatgaataccctgaaatcggtgaactgcttaaccgtctatttgtgaatagggaattagacgaatggtacaagaacaaatgtgcagataaaataaaagtgcctgatgaatttagtcaaataaaaagtctaaaaaaattgaagttagagatttaaacaatccttctggaaaaatcaatatccacatgcaagatctttctggggaaaatggatttcatctagaacagcaaaacaatatgaaagtatctaatctggttcctgtttatgtaccagattatagttattcccttagacatgaattaatcgacggggcttatgatattgtaggtaccgctgaatctttagaattcattcagggaacgaactatatcaataaagtaatgcaagagaaagggtttatcgaactcagtatttgtatgattactacgatactgtgtatgaggggagtgaattgccccatatacagtctttcaataggagattaacattaggagatgccttgtttactgatgtattagaattgctatagttaagagcttgccctgttgtcatcggcaagtttttttatagatagtataacaatgtggagtacaaggagaaactggatggacagaaatcaaatttctcaattgcagccattgaaaatctgtaatggctggtctgtagtacagaacaatttaaattcagaaaaaagaatggaagaaaaatatgaactgctaaaactacaaaatgaaaaacgtaatgctgttattaaggcaatatttgaaaatgatcaatatcatgtcaaagtagcgggcttaaaagcagataagatttataaagaagactcttttaatgaaatggaacaattattggaagagctagaatatcaaatctggactgtgggaagcggggttttagagggtttgcaacagctaagccaacatgttcccaatttcttaaggcttaagataccggcgggctggactgttgattatattacattaaaagatactgaccctaaaactctagaggaaaatgatgatgcttggttatttgactttaatcaagacctcctgcagatttctcataaaactaaaaatttgctgcttgatgtagggtggtacccagaaggcgatccaaccggcagttatggcattgaactgataaaaaacgaagattgggaaaatcctttagaagatattatgtgtactgaacttaaagaattacttaaacaattggaccttatttttatgaaagaaatgaaaaatgaattttaataaaagatataatttgttgaaggagtcttcgttagatcgaaacgcaggacgattgagcacgaagactatttttagagaggaaaacaagtgaaatgaaaatacatcaaattcacgattttgatctaaaagatgaatcggattttgttcaaacacaacaatcccttatacataaaatcaacctatcccccgtcatccatccagactccgtcaacacctgcgcaggcgtcgacctcgcttattgggagcgggacggggaaccgtacggcgtatgcagtatcatcgtgattgacgctgatacaaaagaagtgattgaaaaagtgcacagcatggggaaaatcagcgtgccgtatgtttccggttttcttgcgtttcgcgagctgcagctgatcattgaagcggccgaaaagctggaggcggagccggatgtgtttttgtttgatggcaacgggtatctgcattacaatcatatgggcgttgccacccatgcggctttttttctgggtaagccgacgatagggattgcgaaaacctatctcaaaatcaaaggctgcgatttcaagatgcctgaaaatgaagtcggcgcctacaccgatattctcattgacggcgaggtatatggccgggcgcttcggacacggcgggacgtgaagcctatcttcttgtcttgcggacataacattgatttagaaagcagctatcagatcacaatgaaaatgatcaatcgagaaagcaggctgccgatccctgtccgtctggctgaccttgaaacgcatgttttgcgaacgttttatcgggaaaatcacgtgtaacacttggggctttaagccaccaagtgttttttttgtatgcctggtgtctgctttattaaaaactttgtcgtccttgcagataggtttttatttgaatgtttttcgcgtcaaatcgataaaagcctttaatggcgcagacatccacttgtccttatgccatgctagttgagtaaaaacagggcattcattctgccaattgagttctttcatccgtccttcggcaatatcgtcttttactgtcatttcaggcaatagtccaattccaagtccggccatcacgcattgtttgatggcttctatgctgacgaattctaatttgttaggatagactccggcgtcatgtaaagtgttctcaaagagcgtgcggtatgaacagccgtcctctgtcagcagaagggtttcattttgaagatccttcaatgttgctggtgagtctgctggaaaaggatggtcattggcggctaccattttgatttcatcctgaatcaaagattcaacgtgcagtgcgtcttccgtccgattcacatccaaaatgaaagtgatatcaagctggccctgtaagagctgttctttcgcttgttcgttggaaatatacggtttgaatatgagctttacttgaggaaaagcctgtttgaattcttttatgataggcggaagacggtatgtgcattggctttccgtcgcgccgattttcaaggttccggttgtttctcttacttgatttgcggccatttttgcttcttctgttaacgcaatgatcttctccgcataggatttgaatgttttgccggcttctgtcaggatgagccgcttgccgagccgttcaaataaaggagtcccgatttcttcttcaagtgatttgatctgagaggtaacgcttgattgtgcatagttaagcatcttggcggttagggtgaagtttacatgttctgctgcggtaataaaggtgatcagctgcttcaattccataagttctcgccctttctaaatcggtttttccgattggaataatcgaaataatcatctgtattgattgatgaatccattatatgatgaagaaaatcattcgtaaacaaaggagcagatgcatcatgaaaattgcggttattaacggcggaactcggcctggcggaaatacggatattcttgcggagaaggctgttcaaggattcgatgcggagcacattcatttgcggaaatatcggcttcagccaattgaagatctgcgtcacgctcaaggcggctttcgtcctgttcaagatgactgcgattctattattgagcggatattgccgtgcgatattcttgtattcgccaccccaatttattggtttggcatgtcagggacattaaagctgtttattgatcgctggtcacagacgctgagagatccgagatttcctgattttaaacagcaaatgtcagcgaagcaggcatatgtaacagcagtgggaggagacaatcctaaactaaaagggctgccgctgattcagcaatttgaacatatttttcattttatggggatgtcctttaaaggctatgtgctgggagaaggcaatcgtcccggtgatattcttcacgatcatcaggcgctgagcgcggcgagcagcttattgaaaagaagtgatgctctatgaagctgctgctggttatctctggtatgttgattcttgcactctttttagcttggaaagcgccgacttctgtttggatacaggctgaaaccaattcgcctcaggttcagcaatttgtgagaatggcaggcgcaacgctgcaagttaagcaaatcatcaagagtgatgcaggcgaagaaacagttgtcatatcaaatggtatttccgggccaaaataaaaaagcacctgtccaggtgcttttctttataaatgaggaaccacaagccctccatacaaaaacgccgcgataatcaggaaggccggatgcatcttgaattttgtcaaggcaaggagggaaatccccgcaatcactatcgcttgaacccagccgatcgctttgatgccgtctgcgccgatttgccaggtaagaatgagcatcatgacggcgatgacaggctggacggacagcgtcatacctttgatgacgggggattggcggaagcgctgaatgatgcgcaagaggacgatcaatgcgagcgccgacggtacgacggtagcgatcagcgcaatcaggaacccgggccacccgcctgcgctgtagccgacatacgccgcgattttggttgcgatcgggcccggcaatgcgttcgcaagtgcgagcatatttgagaactgatcgtttgagagccagctgtatctgttgacgacttcttcaaacatcagcgggatcgacgccggtccgcctccatatccgagtacgtttgcgacaaaaaacgccataaataaatagatcatgatcatgaggccgacattcctttatcttttgaacgtttatttgtgattttgtcctttaatttaaaatgaaacgcgccgtacgccaagaaaatgataatgacaaagccgggattgatctgcagcgtttgcaggccgataaaagcgatgataaaaaacaggatgcccgtgacccagccgaaacctttaagcgctttttggccaaactcgtacgccataatgccgagcatgacggcgatcaccggtgttacagcgccaatcatgccggcaacaattgctgagcggcttaagacattgacagccgcaaacaagcccgccatagcaaggcatgtaggcagaatgtgggcgagggttgccaagattgcgcctaacgtgcctttcagcttgaagcccagatacgcagccatttttgtggcaatcggtccgggaagcgcattagcgatcgctaatatttctccgaattcatcatcatctatccatttgtatttattgacggcttcatggcggatgagcgggatcaccgacgggccgcccccgaatccgagaatgcccgttcggaccatcgccgccgtaatgtcccaatagggatgtttcatggctatgtcctccttacagcttcatgcccgttctgcttttataccgtttaatcagcatttggcagtcgacactgacgacgcctttttgcgtatagagccgttttgtcaaaaactcttccatctcctgatcatttgcgaaaatgccgtgcatatgcagcttgctcggtccggtcatatgataaaggcttgtcacggccggctccttttcaagctttaatgcggtttcctccaaatactgcggctccacctccacattaaaaaacacggacacatgacggccgattttcgccgggttgatgacagcggtgaatttttcaattacgccggcatccagtaaatgctgaatgcggtgctgaaccgccactcgcgacaggttaacccgctttcctacgtctgtataggaaatcctcccttcctcgtgcaaaatcgaaagaatctgtttatccgtttcatcaaggacaagattcggaatgctgtattcatgttccaacccgcttcaccttccttcatttggtagacattattgtatcatgaaacattacggtatgaagggagaaattttttattgttttcgatatgtaataacttagaatcatttcttatcgaaaagtaaatagtgtgtgagattttctttcaggaatgtggatggccgcgaagccgctttttataattgagaaaatttgtaaaggggcttgtcatgaatacttcaaccatcggaacgaaacaaatggtcgtcagtccgcattatctcgcttctcaggcgggggccggcattctggaaaagggcggaaacgcgtttgacgcggcagtggcggtcagcgcctgtctggcagtcgtgtatccgcatatgacgggtcttggcggggattcattttggctcacttaccataaagaaacgggacgaatcaaagcttataacgggagcggacgttcagggaagcatgtgacgagagacttgtatcggggcagagaagcgatccctctgcgcgggacagaaagcgccattaccgttccgggcatggcggacagctgggatgccgtgctttcggcgtacgggcgtctttctctcgctgaggtgctgaagccagctcttgattatgcggcaaacggatttccggtgtccgccgaccagtgcgtccacacagaacgcaatctcgctcttttagcctcgacgccttacacctcggccatttttacgagaaacaaaaaagcgcccatgcccggtgaacggtttgtccagaaggatctggcggccagcttggagcagcttgccgagaaaggcagaagcgctttttatgaaggagatctcgctcaacgcatcatatcctttctgcaaaacaacggcagccgtctgacacttgatgactttaaagcccaccgcggcgagtggacgaacccggtatcctccgattaccgcgggtgcaaaatctatcaggctccgccgaattcacagggctttacaggcttaatgacgctcaatatattggaaaactatgatttttctcagatcgaacacggttcctttgactattatcatctgctgatcgaggcgctgaagaagagttttcagcaccggaatgaagtgctgactgatccggcattttctcatattccgctggatcggctgcttgataaacggtatgcaaagcagcttgcggaagaaatcggtgacgtggctgcgccggcggtaagccggccggtcggaagcgacacagcttatgccgccgtcgccgatgcggaaggaaatgccgtttcctttattcagagcctctatttcgagttcggatctgccgttacagcgggggagacgggcattctgctgcaaaaccgcgggtcatttttttcgctggatgaatcccatgtcaatacacttgaacccggcaagcggacgttccacaccctcatgccggcgatggcctgtaaagaaggaaagcctcacatcctgtacggaacccagggaggagaaggccagccgcaaactcagacagcgatgattacgcgcatcattgattacaaaatggacccccagcaggcgatcaatgagccgcgctgggtctggggacggacatggggagaggagtatgaagggctgagggttgaaagcagaatcagccctgaaacgagagaagccctaaggcagagcggccaccgcgtcgagaccgttggtgattttgacgggcttatgggccatgcggcagcgatcgtcattgatgaagaaggctttctccaaggcggtgccgacccgcgcggcgacggagcggccgcaggagtatagagctgcgctaactgataaaaaaataagcacgccaagcgcggcagaaagacccgcgtaaaacgaatcgtacacatattgcttttcctcccgccggtgccgccattccattatgccggtgcagcaaaatagcatgaaaacaactcccgcaaatacgtacatttcattgaaaaaattcaccgctgcgatgcccgtaataagcagtgtgatttcgattaatcgatgtgtgccgtttatcggcttctgctttttaacaggctttggcaaattgagaactttgacggcaaatacttgaaacataaggctgagcaaaataaatacggctgaaaaaatcagtaactgtctgcctcctaaaaatgtgtcactcgtttcatacgggtgaggggcttgtaagtttcgccattctataagacattaggctgagtttaatggtaaaagactcaaaaagaccccttttgaaaggggtctttttgactagtttcttctattataaaggttcctgcttcaggtcgggcggacaagcgtatatgtcttcccgagtctggcgtattcattccccgcgagccttgccgcaggcttcagctcatctgtccgtatgtagcctttatcggcgtcatatacttggtcattcaaatgaaaacaaacgactctgccgatgatgaggtctgtcgtcgtttctccgctgtcattttggaacgtaagatggcgttcgagtatacattcaaacctgacttttgcttcttttataccgggaacgctgatgcaagcgctgtctgtcacagaaaggtctgtcatgccaagctcactgacatcaggatcaagccttgccgccgttttgttaatgtcttcaataatggactcatcactgacgtgtacgacgaattcccgatgagcgattgcgtttctcgcggtgtctttctgccgtccgtccgcgcggctgactgagatggccagaagcggcggttctgcggagacaacgttatagaaactgaagggcgccgcgtttacggcgccgttgatggatgaccgcgtagtgacaaatgcgatcggccggggaacgactgtgcccgaaagcaatttgtaagtgtcttttgcgttcagttcgtctgctcgtaagatatgcatgatttcggccgcctttctttatcgtatgacctgattatacagaaagaaaattcggaaacacaacaaaagaaaaccggctgcatatcttatcacgtggcatatatctgattgaggaaaaaggcttccgtttagccggcagcctatttacgaacggtgttacttgtagtttttctttacaacccagatgttcccgtctttccagtactctgttttgctgcagtaatcgtcttttttgcaagggtcttttttatgaggacgataaggttttttctgcgtgcgttttttcttgcggcggcatgattttttgtggctgcgagattttttgtgagaacggcatgattttttatgactgcgagattttttgtgagagcggcatgattttttacggctgcgagattttctcttcttactgctttttggttcttggtacaaataatcttccaatccctcgttgcttgcggactttactgcttcttcgatatcagaatgggaatagtggcccattttgaaacctcctcatgatatatgttttaaggatgcgatccttactaccacatagtacgcatgaatgaaaaaagtgtatgtgtgattcgctgagttttatataaaaagcacagcctaaattaatacagggagggttactgatgaaagaccaatcaacattgcctctataccagctgtttattcacccgaaagacttaatggagctgaaaaaagacatttgggatgaggatccggtgcccgcggtgctgagagtgaatcaaaaacggcttgacattgatctggcgtaccgcggctctcatataagagatttcaagaaaaaatcgtatcacatcgctttttattcgccgaaaacatttcgcagggcgaaagagatacatttaaacgctgaatacaaagatccgtcgatgatgcggaataagctgtctctcgatttcttcgcggagcttgggacgctgtcaccaaaggcgaatttcgtaaccttgcaaatcaatggcagacatgagggggtgtatcttgagctggagtcagtggatgaatattttctggcgaaacggaatttggcggacggcgctgttttttacgcggttgatgacgacgccaatttctccctcgtcagtgatctggagcgggatacgaaaacatcgctcgaacttggttatgaaaagaaaacgggaacgaaagaagacgatttatacttgcaggatatgatctataaaattaataccgtgccgaagtcagagttcaagggggagatcgtcaaacacttggacgccgataagtatttgcggtggcttgcgggcatcgtgtttacctcaaactacgatggatttgttcataattacgctttgtaccggaatcatgaaacgggactttttgaagtcattccgtgggattacgatgcgacgtggggaagagacattcatggtgatcggatggaggccgattatgtcagaatacaagggtttaataccttgactgcaaggcttctggatgaaccgtatttccgcaaagcgtacaaacggcttttggaagagacgcttcagacccggtttaccattgaacatatgaagccgaaggtcatgtcactgtatgagcagatcaggccgcatgtcgcgaaggatccttataagaaagaggagattgatagctttgaccgggagcctgaagtgatttgcgaatacattaaggagcggtccgccttcatcagcagtgagttagagcggtggaatatctgatttgggaaagaagcaagattttttacaaataggctggtgaatcagttcccgaaaataatcgtgatacgtatatatgcattatgctttttacattatgagaaaaatgactaggaggacaatagatgaaacgcaatacgaagcggcagcggtctgatgacaactttttgcatgcgatggaaggaaaagtaattactgtctaccggggaggcccggagtccaagacagggagattagcagacattcaatcggattatatcgctcttcaggttgataataaaatcgtttattatcaatggaaacatgtgaaaagtgtgacggaaaatacgagtgaaaccatatcgccggccgaagcggcagaatgtgaaaaagctgatgattttcaagacctgatcagccggatgaccaatcgcacggtgcaattgaatcagggaggtccggaatcgaaaagaggaaagcttcacgaaacaggggatgattttctcgtgctggaaacggaagatgacggaattgtatattttaacgccgaccatgtcaaaagcatcagcgcggaacaagaagaggacggccaagaggaggagcgcccggaatttgaaatggctgatgattttcacggcatatttaaacgcctgatccacaaatgggtatccatcaaccgcggaggtcctgaagccgttgaaggtatacttgtggataattccgacggccactacactcttgtgaaagataaagaagtgctgcggatctatccttttcatatcaagagcatcagcgaaggggcaaaaggagcagctaaaaaagaggagaataaagacggcgagaataaaggtgagaaagagagcgccgaagaagaaaagccgcatgaagaagaatcacgcgaagagcagcgtacttcctctaaaaagtcgaaaagatcatcaagatccgttcgatcctcaaaacgggaggaagagaactcttatagctacgccactgtattaaggacaatagattatcggtggaaacacggccgtaaatgattggaaagattgtccgtaaacgcgggagaggggggaatgaaatggctggattaagcagatttctggataaacaagtcgatattgagatatcggggaatacgacattttcaggaactcttttggatatcggtcaggatatcattgtgattcatgacggccggacgtttctttatattccgctgctgcatcttcagaggatgacattgacgctcccggacgaagagaataaagaaccgtacgcaagaaaaaaaagtccgcatcccgaaaaacaggaacattccttttcttaccggaataccctccagcatataaaaggcagattcacagaaatatttgttacgggagaccgttccattcatgggtatgtgacaagtgttttaaatgattattttgttttcttctctccggtttataagactcttttcatctcgatgcatcatttgaaatggctgacaccctattccgatgagcagacgccgtatacattaaacagttcagagctgccggttgttcccgctaatgtgccccttgtccggaattttgaggagcaattaaaaagatatatcgggaagctgattattctggatttaggagatataccgaataaagtggggctgttgcaggatgtctcagataatattcttgaactgaccaatgcagacggcgatactgttttttggaaattgaatcatttaaaaaccatgcacctgccataaatgataaaactgcctctcttatacagcaggcagtttttttcatgggggctaaaggtaaatccaactgatccaaacatataaaacggtaatggtaaacacgacggtgagagggacaacgataatggtcgttttgatatattctgaccaagaaactttttcgccgtgctgtctgatgatatgcatccagatcagcgtggctaatgtcccgatcggcagaagcaatgatccgatatcactgccgataatattagccagataaatgatttttacggttaatgggtcgatggacatttcagttaatgtcaaagtgctgatcattaaggcgggatggttattgaacaaattagagaggacggatgtagcaatgcccataatagatgcagcgtgggcaatactttgtgagacatacggctcaatagactgaacaagcagcgccgtcagtccgatattatgcagtccgtagatgataatgtacatcgtgaaggcaaaaataaagatatgccaaggcgctttccttaataagtctgccggtccgatttttaaataaaaccatctccagccaagcaggatgactgaactgatgacagccacgagcgaaacgggtatgccgttgtaagaagctgcaaacagactgatccggacgaacaatacaaataccaaaacacaaaacatgatgttcgtacggccgttttgggtcgggtctggcggaggctgaagcggatgatatcgtttgtgttccagcgagtcaaagtgaaccggaatatcggggagctgtttcggcaaacggcggtaaaaaacggcaaacagcagaaaggccataaacaccagtcccagcgtgccggggataaacatcatattggtgtacaaataaaggtccatgcctatcattttgagagaaatcaaattgacgatattactgacgccgatcggggtgcttgccgccgtcgcaattaatacgccgctaattaaatacggtgttttctgatgtcttttaagtccgagatattgtaagaccaacagtaaaataggagtggtgattaagacgctgccgtcattattcagaaagagcgtcattgaaaaacagagcaggttggtcagccaaaaaagccggatgcccgatcccttggcgcggtgaagcagtttggccgccgcccagttaaaaaaaccgaagctttccagcgcgattgccataatcattgtggagataatggtgattgatgctccggtgacttttgaccctatatcccccaaatcatgaaaggaaacggttccgcataacaaaacgagaatggcgcccagcgacgccggaacggcttcatttaatcccccgggtctccaaaatataaagataatggtcacaaagaaagaaatcagggtcaaaatgacggtaatatgtgtaatgtgttctgcctccttttagatgggtcattgccgccccgttatttttatccctcctgatcagttgtactgtatgtatacgggtacaggtcgtaaggtgtactgagcgtttctaccaatttagtaaaaatccataaaagcacaaaaaaaagaggctgctttcggcggcactcttttttatgcattttccttatccgcctgcaataaagcctggcgcttattcataatatccagaaaatgtttcagaatcggattttgattatccttgcggtaggcaatgacccattcggctgtgagctgcacctgattaatgccgcgataggcgacttcgaggttaaacagctttttagcagaagaaggcacgaaggtcacaccgatgccggcactaaccaatccgatcaccatttgatactccgtcgcttcctgaacgattttcggtttgaagcccgcctgctcgcagtagtttacaaactctaggtataaagtcggccatgtttctttcgacagtgtgataatcggttcattttttaaatcctgaatgtcgattgtctgtttagcggtaagcgggtgctgcttcggcaaagccagaatgcacgggctgctctgcaccttttccatatgtaacgcggaatgctgtaaaggcggatgaaggatgccgatatcaatgttccccttcagaagttcttcctgctgtctgaaagaagaaatttcacgcagatcaagcttgacggaggggaatttttcgcggaattcccgaatgatcggcggcagaaattcatatgtggccgagccgacaaaaccgacgacaaggcggccgagctctccccgcgccgttctctgcgccatttcaatcgctttgtctatttcttcgatcgcgtttctgctgtgttttaaaaaactttctccggcagctgaaagctctacaacccgtttcgtgcgctttaataaggtcacgccgacttccttctcaagctgtttgatctgctggctgagaggcggctgtgtcatatttaaccgaagcgcagctttgccgaaatgaagttcttcggcaacggcaataaagtattgaagatggcgaagctccatccttatccattcctttctctttgttaattattcgtgaaacatattaatcatacggcgaattgatattggaggtcaatttccaaagagtgtatagtgaataatatcacaaattacttaaaattttatatttaatatgcataataaggagtgagggtgttggcaaaagcaacaaatgaactaaaaacctctggaaaaaatcggggggcggagcttgttgttgattgcttagtggagcaaggtgtcacacatgtttttggcattccgggtgcaaaaattgatgcagtatttgatgcgttaaaagataaaggacctgaactggttttatgccgtcacgaacagaacgctgcatttatggctgcggctgtcggaagactgactggaaaaccaggcgtttgtctcgttacttcaggcccgggggcatccaacttggcgaccggcttgttaacggctaatacagaaggtgatccggtagtggcgctggcgggtaacgtaattcgcgcagaccggttaaaacggacacaccaatcattggacaatgcggcactatttcagccgattacaaaatacagtgtagaagtacaggaaacagggaatataccagaagcggtaacaaacgccttcagggcagcgtcagcaggtcaggcaggcgcggcttttgtgagctttccgcaggatgttgtgaatgaaatcacaaacgtgaaaaacgtacgcaacgtgccggcgccgaaacaaggccctgcaccggaagaagcggtcagcgcggctatcgcgaaaatccagacggcgaaacttcccgttctgttagtcggcatgaaaggcggaagaccggaagcggtaaaacaaatccgcaaactgcttgccaaaacaaaactgcctttcgtagaaacgtaccaaggggccggcacattgtccagagagctggaagaccaatatttcggccggatcggactgttccgcaaccagccgggcgatcttctgcttgaacaggcggatgtcgtattaacgatcggttatgatccgattgaatacgatccgaagttctggaacgtaaacggcgaccgtgctattatccatcttgacgaaatccaggccgatatcgatcatgcctatcagccggaattagaattattaggcgatatcgccgctacggttaaacaaattgaacacgacgctgtgacatttgatatgggcagccgtgaacaagaagtgctgagcgaattaaaacagatgctcacagacagcgagaaggcgccaagcgaccataaatctgacagagtgcatcctctgcaaatcgtccaagaactgcgcaatgcaattgacgacgacgtaaccgtcacttgcgatatcggttctcacgcgatctggatgtcccgctacttccgcgcttatgagccgctgaaactgttgatcagcaacggcatgcagacattgggcgtagcgcttccttgggcgattgccgccacattggtgaatccgggtgaaaaagtcgtatccgtttcaggagacggaggattcctgttctctgcaatggaattggaaacggcagtccgcttaaaagcgccgatcgttcaccttgtatggaatgacagcacatatgatatggtcgcattccagcaaatgaaaaaatataaccgtacatcatgcgtagatttcggaaacattgacatcgtaaaatatgcagaaagcttcggcgccaccggcttgcgcgttgagtcaccggaacagctggcagacgtgctgcaaaaaggcttgaacacagaaggccctgtcatcattgacattcctgtcgattacagtgacaatgtccatttatcaagcgacatgcttccgaagcaattcaaagaaaaaatgaaagcaaaagctctctagcactctgcgcaccatgacctgttttctaaaacagcccaatttaaaaggagtgaagggaatatgaaaaacgcaagcgacatccatatgatgagccgcggagaaaaaggctcacctgaggatcagatctatcaagtctcaacaatgacatctctgctggacggagtatatgacggagattttgatatggctgacattccgaagttcggtgatttcggaatcggcacgttcaacaaattggacggcgaattaatcggatttgacggagaattttaccgtctgcgcggcgacggaacggctacgcctgttaaaggcggagacctgtcaccattctgctcattcacatttttcacgccggatatgacgcatacgatcgacggcgaaatgacccgtgaagaattcgagcaggaaatcgccagccttctgcctagtaaaaacttattttatgcgatccgtttagacggcgtatttaaaaaggtgcagacaagaacggtagaacgccaggagaaaccgtacgttccgatgatcgaagcggtgaaaacacagcctgtgttcaactttgacgacattcaggggacaatcgccggcttctggacgccgggttacgcaaacggcatcgctgtttccggatatcacctgcacttcattgatgaaggacgcaattccggcggacacgtgtttgactatgtcattaaagattgtaaagtgaccatttctcaaaaaatgaatatgaacctcaagcttccgaatacggcggactttttcaacgcaaatttagataatccgaattttgcgaaggatatcgaaacaaccgaaggaagcccggaataaattaaaaaagaaagcctcatttttctcgggggctttctttttatttggctgaaccggcaaagattaggtaaaatacagtcaaaagggaaaggtgtggtagctgtgaaagtattggtattagcggttcatcctgacatggacaactcagcggtcaataaggcgtggacagaagaattaaaaaatcatgatgaaatcacggtccgtgagctttataaagaatatccggacgggaaaatagatgcggaaaaggaacggcagctgtgtgaacagtatgaccggatcgtatttcaattcccgctgtactggtacagtgcgcctccgcttttaaaaacatggatggatcatgtgctggcgtatggctgggcttacggttctaaaggaaaggcgctgcacggcaaagaattgctgctggctgtttccgtaggtgccggagaggatgcatatcaggcaggcgggtccaaccatttttcactgagcgagctcttaaggccgtttcaggcaatggctaattttacgggtatgacctatttgccggctttcgcgatgtacggggtaagcagcgccgatgctgcggctatccgtgacaatgccaaacgcctggcggattacgtaaagaagccattttagagtcgtatgcattcatcttcatccgacaatatttcctgagaaatatttcgaaccttagacgcttctgactgccaagaaagaaaaaaacggatttcgcgctgaatttgcgaaatccgttttgatattatgtcagtttttgcagatcttttgtgctgatatatcccgtggcgcccccgtaatcgacaagcgcccagccgaagtcaatgccgccgccggctgtctttttccatctgaggaaagaaacgctcgtgtttttggcaagggaagctttgaccgcttgtttgtctgtatatacttttgtttttgccgtcgtttttacggttgttgcttctttaacaatataatgagtagatacaaatcctgtttttccgtttttataatgtacttttgcccagtcagcgttctggaacgaaacgatctttaagctgtcgcctaaatgaagggtatcagctctcggactggctgctgatgcttttgttctgacgttcaatgcttccgcggaaacgagataagagtcaagcgggtagctgtacagatcgtcaattttgaccgcttcttgcgcgtgtgtctccggaagaggcgttattccggcagctgaagccgctgatattcccgctgcaagggtcagaatggatgccgctttggctgttttcttcatctgtatctctccttttactacatcctttcacgttttaccggaagtctaaacatcggccggttatttttgtgtttgaagtttcaatggagcggaaatggtttttttgactttttctcctttgagcacctgctccgccgcttcggccgccagttttccgatcagctccggctgctgggcgaccgtggctgtcagctttccgtttttaatggaagaaatcgcatctttatttccgtcgaaaccgacgaccaaaatgtgtttgcccgagctgttaatcgcttcgagcgccccgagtgccatttcatcattatgggcgaacacggctttgatatccggctgtccctgcagcaggttttccatgacggtcaatccttttgtacggtcaaaatccgccgcttgctttgttacgacatccagctttttgtcggcaatatgatgaaagcccgttccgcgttcccgtgtcgcggatgcgcccggcaccccttgcaattcagccactttggcgccttttccgagctgatcggcgaggtagtcggccgccatttctcctcctttgacattgtcagaggcgacaagcgtttcgactttgccgtgttcggctgaacgatcaagcgcaatgacaggaatgccgagggaatttgccgattcgacggctgttgaaatcgctgatgaatcggtcggattgatcagcagcgcatcgactccttgctgtatcaaatcttctacgtcatttgactgtttagatgaatcattttgagcatcgacaataatgaccttcatgccccgttttttggcttcctttataacgccttcttttaatgaaacgaagaacggattgttcaatgtggagacggagagcccgatagtgaattcttttttatgttttgtgtttgacggttttgcccattgcggcggttcaagtgaacaggcggacagcaaaaacagtgataatgccgcgatcgtgatgatggctttcttcataatggtcctcctattatgccgattttttgcggtccagcagcaccgcgattaaaatgacgattcctttgacgacgagctgataaaaagatgatacgccgagaaggttcaagccgttgttcagcgtaccgataatcaaaaccccgatcagcgtaccgatgatgcgccctcgaccgccggacaggctcgttccgccgagaacgaccgccgcgatggcgtccagctcgtatgattccccggccgtcggctgtgcggaatttaagcgtgatgtcagaatcgctcccgccagcgccgataataaacctgtcagagaatagatcatgatcttgatgcgggacactttgattcccgatatcagcgccgctttctcattgccgccgatggcgtatgtccggcggccgaacggtgttttgtgcagaagaacccacagggccgcaaatgcaatcagcatcgtaatggcaggtacgggaatgccgagaaaataaccgcgcccgaacaattgaaatgcgtaatttgaaccgagccccgtaatcggatttccgtccgtatagacgagggtcagtccgcgaaagacggtcattgtcgccaaagtggcgatgaacggcgccatttttccttttgtgattaataatccgtttatcatgccgagtacggcgccgatcacgcagccgatgatgacggctaagatcgggtcgatgcctgagaccatcatacctgcgaccaatgcgctcgataaggcgaggatggctccgacagagagatcaatgcctcccgttaaaatgacaaacgtcattccgaaagcaatcagagcgttaatcgcaacctgcctaagaaggttgagaatattgaggggttcaagaaaactcgggtttaaaacggaaacgatcagcacaagaatcagtaagccgagaaacggaccgagtttttgcgtaaaggtatgaatggaaaatcgcttttgttcagttgatgtcattggttcagttttcattctgctgccctcccgtggcaagtgtcatgatgtgttcttgtgttgcgccggccgcattgatttctccgctgatgcgcccttcgtggacgacgatgattctgtcactcatgccgagaatttccggcagctcggaagacaccatgatgatggcgactccgcgatcggtcagttcattcattaatgaatagatttcccttttcgcgcctacgtcgacgcctcttgtgggttcatcaaggatgagaactttcgggccgattccgatccatttggcaatgacgactttttgctggttccctcctgataaatgccgggcggcggtttcaggagatgcggtcttaatggtcagacgcttgatgagcagctcaacgaactccgcctcgcgttttcggtcaatgatgcctttcggagagaagctggtcaggttcggcaatgagatattttcacgaatggacgtatccagcagcagcccttcatctttgcggttctccgtaatcaggccgagtcccttgcggatggcatcgtacggaccccgaatgccggtttttcggccggaaatccagatctctccggaatcgagccggtcaattccgaacagcgccctcatgatttctgtccgtccggcacccattaagccggaaacgccgaggatttctccggctctcacatggaaactgatctgtgaaaagcttcctttttttgaggcgtttttcacttcgagcaccttatcgccgagtgacggcgtgcgagtcggataccgatcggtcagctcccgcccgaccatttgtttgaccacttcatcaaaattagtatctttaatatgcgtcgtatcgacagtgaggccgtcccgcataatggtgatctggtcgcaaatcgaaaatatctcttccattcggtgtgaaatatagacgatggatacgccgtcccgctttaacgccgtcatcacgtcaaacagtttgctgatttcccgttcggtcagcgccgcggtcggttcgtccataataatgacttcggcgtttgtcatcagcgctttggcaatctcaatcatctgctgctggccgacggaacattgtccggcttcccggtcaagaggaagagagactcccagtttttcaagctgtgattttgctagcgctttcattttcttcgtttccaaaacgccgaacgccgtcgtcagctctttgccgataaaaaggttttcaagcaccgtcatgtccggccatatattcagttcctgatggataaaggcgattccgtgcttttcggcttcctttggattggagaagctcatatttgttccgtttatcgtaatgtttcccttgtcgagccggtggagcccggtgagcagattcattaacgtcgatttgcccgctccgttttctcccattaaagcgtggatttctcccggcagaagctcaaatgagacgccggagagcacttggtttttgccgaatgctttatgaatgtctgtcatgccgatgtgcatgctggatcccttctttctagaaaatcacacccgcctgcaggatgcagttggcgtatggtgtcatttcacccgttcggatgacggcttttgctttctgtgtgagccgtttgaattcctcgtgggacatgtactcgatcgtctgcgctgagaaatggctttctatgaaacttgcattctcagggtttgcgtctttgatttcagaggcggccatcaccttttcgactgccatctccccggctaccaggctggttacgtcccgaaaggcgggaacgcccgccgttaaagacaaatcaattttagggacaccgtcagggacggggagacccgcatcggcgattgcgatgaggtctgtatgcccgagatcggctaatactttggcaatgtggctgtttaacattccgtgttttttcatgacagcagctcctcaacttcttttctggccggcatcccgccttgggcgccgaagtgctgcacggacagggaggcggcgcggttggcaaacaagagcgcttgctcgatgtcccgaccttccgcgagtgcgacggcaagtgccgcattaaaggtatcgccggctcccgtcgtgtcgaccgcttctgcagggaaggcgggaacaagccgttccgcggtgccgtctgagtagcgtacgccttgttttccttcggtaatgaacagtttgccgggatagccggcgagcgcttcttctttcgtccggtcaggaaataaaatggatgcttcatgttcgttcggcgtaagatatgcggcatcctcaatcgtcgattgtttcagcggccgggccggcgcgggattcaggataaccggaatttgctgagcgcggcagtagctgcacacttcttcaacggtttcttcaggaatctcctgctggatcagcacgatatcaatgccgggaagttttgccagcgcacttttggcataatcgggggagatgtcatcgtttgcgccttttacgacgacgatgctgttgtctccttctgcgagcacaatatgagccgttccgctttttttatgtgtaaccgtttccatatagtccgtattgacaccgtttgccttcaggttttcaataatcgcttttccgtagctgtcattgcctgcttttcctaccatatatacgtttgcgcccaggcgggaagcggctacggcctgatttgcgccttttcctccgggcacagtttgaaagtctgtgcccagtacggtttctccggctttcggacgccgttcagatgtgacgaccagatccatagaacagcttccgataacacaaatttcactcatggtgatcatcctttctcgtcgtttgtcttcttatgtaagtcacgggcagttgaatggccgtctctttcggcggctctttctttatcaattgcagcagcaggtttgccgctttttttcccatctcatatgcaggctggcggatggttgaaagcggcgggaacaaaagcctgctctgcggaatatcgtcgtatccgatgatctgaatctcctccggaacttttttgccgagccgcagcgcctcatggaggacggcagccgccgcaatgtcgttgctggcaatgactccgtcggtttccgggtatgctgcaaacaattcttctgctaaaatggcggcatccttgatggaaaatgaagcggcggagatgacattgaacggcgcgcccgctttttgcaacacgttaagtgcgccgttaaaacgttcctgagcggttggaaggtgggctgggcctttgacaagcgtgatgcttgtgcttttgccgcgaagcatttcctcagccgcccgttttccgcctgcccgcccgtcactgaatacggatggggcgccttcttttgtccggtccagaaatacgaccgggtaaaggctgccgctgtattcgggaaggtcgggataatgggtggccgccaaaataccggcaacttgattttgtttaaatgtttgcaggtagtcgagttctttttccaattcttcatcgctgttgccgatgatcagccggtatccttcccgctgcaactcgtcttcagcgccgcgggcaagctgagggaaaaagggattcgtaatatccggaagcaaaagcccgaccagtctggattctcttttataaagagagcgggcaacttcattcggataataattcagcttctccatggcaagcatgaccttcgttcgtgtatcttcatgcacgtagccgttgtcattgaggacacgcgaaaccgtggcaacagagacgccggcagcgcctgcgacatctttaatcgttgccaacaaacactcctccttcatttatgtaaccgtttacataaaaagagtaacacgaatcatttcggttggcaacaaaaaaagagaccggggtctcttttagttcacgatgccgatttgtgagatattcactttgatatcagggattatctcgatggaaggatagacctcacgccaattgagccgcttgccccgctcataataatgggtttgatatttacggccgatgccgaggatatccgagttgtgctcctgaatatggctgatcaccgatctggcctggctgttcaaatttgctgatgcttgtttgttcatttggtcgattgccgtataagaattcagcttgtcctttggatattccaagacgcgtgcattcagttttaaacggattttcacttttatatgctgcggatctgtatctataaatacaatctttcgcgtggcatccgtgatgccgagagaaagataattttcaatatccattttgtatttgtcccacagcttcagattaatattagccgatttattaaattgcccgcttaaaagggtcaggagggttgaatcctgaccgagcacctcagtcactttccgctggccgctgaacagggcagaaccctctatctttatcgtctgtccgttaatcgataaataaggaagggcgaaatccttatcagccgtcagcatgcttgaacggatggattgcaaattttccatgctgatatttgattccgcattagcgcttgttaataaattcgttaaatacttgctgacgatcaatttctgccggacgatcagcttcagcacttcaatcgcctcaccgtctttgacaaccgccggatgagcgagaagcgggcttttcggatctctgtaaaagacatcgagataaggaaaaagcggtttttccgccattttctcaccgattaataagactctttgcttggacgtgtcaatgcgctgatcgacaagcttatccaattgaaaccgcgcttcacggatggtatgcccggaagcgctgagcaccgtcgtaatgaatgagccgcccgtttcctgttccgcctgggaggactgaaccttccgataggtgatgccgattttatttttaccgtcatgatcaacatcaaggcttgcggtcagcacgagagaaatatctttcagcaaattttgatcccagcagcccgcaagtgtcaggcttgcacacatgagactgataagaaccgcttttttaatgcgcatggcggacaccctttttgcgtacaaggacaatcaataccataaacaacggaaacaaatacacaaacacaatatcggaaatgcggaaaaactgatccagctgctgtatcgttttatctgtgcttgtggcccaaatagacagaaggaagacgagcagggccagcggataaacaaaccggctgtggtctttttgattgaacagcttggcaatgccggtgcttgccaagtaaaacacgttggccagcgttgaaaagacggtcacgaaccaaaacgtcaaaaagagcagatccgtccgttcgataattctgaatgaaacggtttttaacaggtacagcacaggctccgggatcatttttatttcttcggggctgattgtgacaaagcaagcaagggtgatatacaggtaataaaggataatcaagatgtttgaaatcgtcagtattttgtagcgctggctgacggtgcagttgataaggggcccgattacgagcgccgcctgaaagccggtaatgctgacaagtgtttgctgcaccccggtaagcatgtcttttgcggttccgtgaaaaatcggcataatgtatgtgatatcggcttttcccagcgtgtataaaatcggcagagagatcagcagcaaaaacggtgttaagataaagctgaacctggcgatcgcattcagcggggcttgggcgatatagacagaaccgaggatcagcattaagctgaccacccaattcggagtctgcgggagcacccagatatccaatatccgtgtaaatacagaaagaatgagcgtgcagagaaacgcgaaatataaaatatacagcacctgcacccctttgccggcaagtgttccgaacacctcctccagcatttcgtacaggttcagcttcggaaaccggtgaaataatatcatatacaggctgaatgtaagctggacgagcaatccggtaagcagaatggaaatccatccgctgcttcccgatttcatcatcagtaaatggggcagcgccaaaatgccgatgctgatctgcgtctgattaatgaaaaacacgccttgaagccggcttatttttttaggcttcatcttttctccacccccgaacatgtttcatctgctttgagtcttgcggtctcaaataaaacggccttcttttaataaaccaagccggcagccggataaatgcatccttcaagtcgctgaaatgaaacggcgtcagagatgataaataaggaacgccgagtgattcaagcttacacaggttcatcagaataagcccgaagccgagtgcgatgccgataaaaccgaacgacgatgccagaaacataagcggaaacctgagcgttcggatggacgtgctcatttcatatgaaggaagcacaaaagaagatacggccgtaacggctacgacgataatcatcatattagaaatgagtcccgcctgaacgactgcgtcaccgatcacgagaccgccgacaatgccgatcgtctgactgatcggtttcggcagcctgataccggcttcgcggatcagttcaattgtaatctccataatcatggcttctatcagcggagggaagggaatatcaacaatcgaatttttcatggtgataatcagatcgttgggaatgacttcgaaatgaaacgcaatcagcgcgatataaaaagcgggcagcgtaatcgcgatcataaaggcgaaaaatctcagcactcttaaaaaactggcggaaatccatctcgtgctgtagtcatccggagattgaaaaaaagaaaagaatgtgatcggcgcaatcaaagccgacggactcccgtccatcatgatcagtacacagccttccatcacgcatgcttttgctttatccggacgttccgtatgaatgatctgcggaaaaatggaaaacgaattatcttctattgattcctcgataatcccgggcgcaagcacgctgtctatacgcaggtatgacaggcgccgcttcacttcctccacaatctccggattggcgatattctcaacaaagataaccgcaacttttgatttggctctttctccgatatccatataatgaacggagagatggcggtcctgtatgtgaaaccgcagctgatgaatgttcgtttccaaactttccacaaacccgtcatgggcgccgcggatgatactttcagattcgggttccataatggaacgtagcggattctgcccgacggaaaacagcttcgctttcctcgatgcatcgctgagaaaaacaacctgcccggccaaaatcccgtcaatgagttttctggtttcatccgtttccgcactgctgacggcattcatcgtttcctcgagcgggccgttctgcagggtgtcgcttaacagaaactcattcagcttctgttcttctatcatttgttcaatataaaagaaagcggtatgacggtcctgcagtttgatccttcgtattttaaaatcaccgcaaacacacatcagctcctgcatttcccgtacagccgattcaaaatcgccgggaatccgtttgttttgtttatccgcagacatcagaccgcctcctttcccggttatctgtagttttcagcgggtattccttttttatgcattttataaaatagaggagctcctcgatgttttaccaagaacttcacatttatggatgaatatttcttgaacgaatataaagatttattaaaattatttcaaaagagggataaatgtcctgtaaatggtttaaaaggagaaaggctttccgcatataaaatgtgtatttcttgtaaacactccggacccgtcttattctgtcatgtaccagtcattccgctagttattttggaatgggactgaaagcaggatacgggggaaaatgaatgactttatgaccttatccttaacaaaacaggcagtctgcacacagcggacagagagtcccgaaacgtatgcgcagtgcgaaaaacgctgatacaaacgggctggaaaagatggattatcattacatctttttcttccggaacgcgaatagttccattggtccaaatgaatttctttgtgcaaatgtaaacgcattcatttttcttttgaaaaattgaagtaaggttgaagtcctgcctattcccaaaaaaagcaattcgataataggaagaatagcgtcactaatagagaagtttggctcagtgaaagcgggaacattatgttacataatgccgattgagaattcatagtgaagctatatactgatgaatgaatttatcaatacagaaggagatgtcaaaaatcaatgtggttactcattatagcctgtgctgccgtactaatcatcggaatcattgaaaaaaggcggcatcagaagaatatcgatgctctgccagtacgcgtcaatattaatggtatccgcggaaagtcaaccgtaacgaggctgacgaccggaatactgatggaggcgggctacaaaacagtcggaaaaacgacgggaacagatgcaaggatgatttattgggatacacctgaggagaaaccgatcaaacggaaaccgcagggcccgaatatcggcgagcaaaaagaagtaatgaaggaaaccgtagaacggggcgccaatgccattgtcagtgaatgtatggcggtaaacccggattatcagattatctttcaggaagaactccttcaagccaacatcggcgtcatcgtgaatgtgcttgaagaccatatggacgtcatggggccgacgcttgatgaaatcgctgaagcatttaccgcgacgatcccgtataacggtcaccttgtcattacagacagtgaatacacagacttctttaaagaaaaagccgcagagcgaaataccgaggtcattattgcggataactctaaaattacagatgaataccttcgtaaatttgaatatatggtctttcctgataacgcttcccttgcgctcggcgttgcccaggctcttgggatagatgaagaaacggcgtttaaaggaatgctgaatgcgccgcctgatcctggcgccatgagaatcctgccgctgctcagcacgaaggagcccggtcatttcgtaaacggctttgccgcaaatgatgcatcttctactttaaatatatggaaacgtgtaaaggaaatcggctacccgacagatgaaccgatcgttatcatgaactgccgcgccgaccgtgtggacagaacgattcagttcgcaaacgacgtgcttccgtacattaaaacgaaggaactcatactcatcggcgagacgactgaaccgatcgtcagagcttatgaagaaggcaagattcctgccgatacactgcacgatctggaatataaatcaacagacgaaatcatggacgtgctgaaaacaagaatgcaaaaccgtgtcatatatggcgtcggcaatatccacggttcagcggaaccattaattgaaaaaattcaagagtataaggtgaaacagctcgttagctaggaggaaaaggataaatgttcggatcagatttatacatctcacttattttaggcgtgttaatcagtttaattttcgcggaaaaaacaggtatcgtacctgccggtttagttgtgccgggttatttagggctcgtttttaaccagccggtctttattttactcgtactgctggtgagtcttcttacatacgtgatcgtcaaatacggtttatccagatttatgattttgtacggacgcagaaaattcgcagctatgctgataacgggaatctgcttaaaaatcgcccttgatttcctttacccgatcgtaccgtttgagatatcagaattccgaggaatcggtatcatcgtacctggtctgatcgccaataccattcaaaaacagggattaacgattacatttgccagcacgctgttcttaagcggcgcaacttttgccattatgtttgcttactacttaatctaatgtaaggtgtgtcaaacgatgaaaaaacaattaagctttcaagaaaaactgctgaagctgaccaaacagcagaaaaagaagaccaatcttcacgtttttatcgcgctgccgatcgtcttttgtctgatgttcgtctgcattctgacagggaaggcggaaacgccgagtgtgaaaagaaatgccgatgaccttgtatcagcctcattcgtcggagatattatgatgggccggaatgtcgagaaagtgacaaagcataaaggcacggagagtgtcttccgttacgcaaagccattcttcgaagcatccgactatgtgtcggggaactttgaaaacccggttacatataaaaagaactacaaagaagcagaaaaaaatatccaccttcagtcaaacaaagatgccgtaaaagtattgaaggacatgaatttcaccgttctcacggcagccaacaaccatgcgatggattacggccctcaaggaatgcgggatacggttgaagagttttcaaagcaaaatcttgaacttgtcggcgcaggcctcacgctgaaggaagccgagcagaacatttcttatcaagatgtaaacggaatcaaaatcgcaacactgggtttcactgatgtttccggaaaaggctttgcagctaaacgaaatgcgccgggggtgcttccggccgatccagagctgtttattccgatgatttctaaagccaaaaagaaagccgatcttgtcattgttcaaacacactggggacaggaatacgataatgatccgaatgacagacagcgccaattggcaagagcaatgtcagatgccggagcggatattatcgtcggacaccatccgcacgtgctagaaccgatcgaaatgtaccacggcaccgttattttctacagcctgggcaacttcgtattcgaccaggggtggacaagaacgagagacacggcgcttgttcaatatcatctgcagaaaaacggcacgggacgctttgaagtcacgccgatgaatattcatgaagcaacgcctgcaccggttaaaaaaggcagcatcaatcataaaacgatcgtacgtgaactgacgaaagaatcgaatttcgattggagcgtcaaggatggaaaattaacgtttgatgtggatcacagcgatatcttaaaaaagaaagcggagtgaaaaacaaatgaaaatcattaaagcgggatggccgtttgccgcgatcattatggtatttatgtttatgtcagcgtttaaatacaatgatcagctcacagatcaggaaaaacaaaaaattgatacggaaatgcaaaagattcagcaagaggacacagcgggcgcaaaataagcgcatgattccgcttgccggcatattgtttgttccgaatccagtaaagaatgcccataacgggcattctttttttgtgtgctctcctaaacatttgttaaaagttaccgatgtaaaaactactaaaaatgaggagagtgaatagaaaacatgctcacaagctggaggaagtacatccttgccggccttatgatttgtcttgtggcacctgcagtaacgagaacggaaattgctgaagcggattctcaagtttctgtcctgatggtttcagacgcgcaaaaacttgtcggaaataaatatgtttacggaggcgaagagcctgaggacggttttgatccgtccggattgatgcattatcttttcagcagacagaacatccatctgccgagaacggtcagtgatcaatggaaagtcggagccgccgtcaaagaaaatgaccttttaccgggagatcttgtgtttttcaaaaagtcggattccacacaaaacgcgcccgtccatgacggtctttatatcggaaacggagagatgatacacagttctccgtcagaaggcgtaaccgtcacacgctttcaaaaaagcagttattggatgaatttatatcttggcgcaaagcggattacaaaagatccggaactggctgatgatccgatcgttcaggaggcagcccgttatctcgacattccgtatgtattcggcggaagcacgcccgaggagggattcgactgttcggggctggtccaatatgtttttgaaaacaagcttcacatttacctgccgagatctgcggaacagcagtggctggtcggtgagaaaatcaaactgagcgatataaagcccggagacgtgatttatttcagcgacacgtataaaaaaggaatttcccatgcgggcatttatgcgggagagggaaggttcatccaagcaagccgctccgcaaaagtcaccatttcttacttgtcggaagattactggaaaaaacattttacgggggtgcgccgattcagcaatttagccatttctaaagaaaatcccgttgtgtccacagcggccgatcatatcggaatttcttatctgaaaggcggcgtttcaccggaaaccggctttgatacggcgggatttgttcaatacatctatcaaaaagcgaaaggaatcagcctgccgcgttatgcggacaagcagatgcaggcgggcgttccggtcgataaacaagatctgaagcccggcgatctggtcttctttaaagcggaaagcctgaatccggccatttatatcgggaacggacaagtgattcatgtcaccgtgtccgcaggcgttaccataacaaatatgaacacaagcgcttattggaaggacaaatatgcgggcagcatccggcttccgtaaaaaaagacgtcagagagtgtctctgacgtctttttcttttaccgtttcggcgctctgtatccggccgctaccgcatcctctacggaacagaacatttccgcgggatctgtcgtccggtcgtagtatgtacttcccggcgtgtgataaatgccgttccggctgcctttaatgtcgcatccctgtgaggtgccggctgctttcgtttcggcatgtccgccggaggaaggggcattgttttgcgccgtttccgcgttttcggatgtttttgtttctgctttctgccgctttaaagttttattttctgactgaagcgtttcagcggtcttttcgagcttcttttgtgaattttttaatttctcattgtcttgtttgagtgatttgtttgtttttttcagctcacttatctcttggctgagtttgctgagtttttcttcattgccggcttcggcttcggatttctccttttcggccgcggcactgatgctttcatattttttctcaagcgcctggtgttccttcgtcaatttttgataagcggtatcaagggtgctgtatttctcctctgccttctcggccgaggcgtccggttctgcgagggaggcgccggtcagaagcaggataaatccgccgatgagaaggggccaaaacagcttttttgaaaaatgtttttctttttttgccgctttgcatatgagatggaatattccgtatccgactgcgcagagaaaagctaaacatcctataatagcgattgcattcgacatcatgaaactccttttttctttatcttacaatttattttcatttttgggaatttcttttttcggaatttcttttttcggaaacatgaaaaaccaggccgtgaaagacctggcttttgccttttattgatcgttgtcgagaagccggtttatgaaatatgcgacgccgttttcatcgttgctttttgtaatatacgtgcttttttccttcagttcatcaatcgcattgcccatggcgatgcggtttcccgccgcttcaaacatggagaaatcattcgggctgtcgccgatggcgtaaatatcctgtttttcaattccgtacagtgaggcaagctccgtcagagcacgtccctttccggaaccggcagggaggatttcgataatgtgtttcccggaagatgtctgggataatttcggatgatgtgtaatttcttctttggcgtttctcagtttttccatatcaaaagagaaacaaagaagcttgtaaacatgttcgtctccgttaaaaatcgcctgtatatcctgcacgggtttaatgccgaattgtttgaactgcgtctttgcgccctcccataatgtccgaatatcttccttgggattggcgcttttcagaatgtccagttctgcctgcagtttggactcgccgtcaaatggggacagcagatgatcatctgtatagacctcaaagtaaatgtctttgtccgttaaataagcggcgatatccttcccggcctgctgatccattaagagccggctgacgaggcggtatcctttgtcatggactgtcccgccgtttgccgcaatgatcggaatatccaaatcctttaagagcgcttttacatcaaacgtggctctgcccgtgcagatggccacgagaatgcccgcttcatccgctctttgtaaagccgctctgttttccggagaaatcacactgtccgagttcagtaatgtgccgtctaagtcaatggctatcaatttcatatgtatggatgccctcctttaaaataaagctgcttcatgtagtatgttcagctttgtgcgaaatcagcagaaagccgtcagttaaaaggctataccttcatgtcctttttttcaacagaaaaacggcgggatttgctaatcccgccgtgacatcttacgcgtttaaatcattttttaatttcgttttcacttcttgaaggttttcctcattcagcttgaaataataaatatttttgccgtactgaggagtgtaaatatagctgtctgaacctgtcagctgcaaagaatccaccgatttcagcgatgtgataaacgggaacagaccgatggcgtcattaagagataagttcatttttaagtttttccctaagctgtcgacgatatcgtcataagatgggatcgagcttaacgatttagattttttaataatggcgctcagcacttccatctgtctttgtccgcgcatcagatcggtgtccgctttgcgtgttcttacataagccagcgcctgctcaccgtcaagcgtctggacgcccggcttcagcacgacttttccttttgtatcgactttaatacgatcggcaattttctggcttttcacatttaccgtaacgccgttcaattcattgacgacatctcggaacgcgtcgaagttgctctcaaccacataatctaccggaatatcaagcatgttttctactgttttataagttaaattataaccgccgtaagcatgtgcgtgcgcgaatttgtcatagccgtgtcccgggatgttgacataggaatcccgcggaatgctgagcatcgtcgctgttttctttttccggttgaaggtgacgagcacgttggcgtcacttcttgcgtcatctactgattcgcccttattgtcacgggcgtctattcctaaaagcaatacggtgaaagaatccttcttcgggtcaaattctttgatccgttttacggactggtcgccgcggtcaaggctgacgtgcgcttctttggtcgcattattcaatttcacaaatgcgtaggtgccgacggaaccggcgatcaccaataagaaagcggcgaataccagtacaaatttcacccattttctgaggcgtcttttcttttttctgcgttgagatcgttcttccatatcattacctctcgtttctattctttgtgaagcgtaccataattgttgacttggagcaaatctgcaaatgagaaaattccaaatctttctctctatttcgacaacatctactgttatttttgcatcaggttcacattatattggacggcaggaagcgggaaatgtttcgtcgctttgtaaaaaataattagtaaaataatggatattaacggtgcggaaggtttgaaacggacggaaacaggtaaaagaagcagtagaacaattccgcgcgttacagcgttggatgaagggagtctacataacatgaaaagcatacactcgaataaatggctctattttttcggcgcactcggcggcgcgttatacggatatgataccggagtcatttccggagctattttatttatgaaaaaagaactgggactgaacgcctttacagaaggcctcgtcgtcagttcgttattggcgggggcgattctcggatcgggatttgccggcaaactgaccgaccggttcggcaggcggaaggccatcatgggagcggcgctgctgttttgtataggcggtttaggagtcgcttttgccccgaatacagaggtgatggttcttttccggatcattctcggactggctgtcggaacatctacaacgatcgttccgctctatttatcggagctggctccgaagcataaacggggggcgctttcttcgctgaatcagctgatgattacggtcggaatcctcgtttcttatatcgtgaactatatatttgccgatgcaggcgcttggcgctggatgcttggacttgcggttgtgccgtcagtcattctgctgatcggaatcttatttatgccggaaagcccgcgctggctgtttacgatcggcaaagaagagaaagcaagagaaatcctttcatcattgcggggaacgaagaatattgatgatgagattgatcagatgaaagaagcggaaaaggaaaacgaaggcggcttgaaagaattgtttgagccgtgggtgagacccgcgctgattgccggcctcggacttgcctttttgcagcaattcatcgggacaaatacaattatttattacgccccgaaaacatttaccagtgtcgggttcggcaattccgcgtctatattgggaacggtcggaatcggcgccgtcaatgtcatcatgacgcttgcggctattaaagtcattgataaaatcggccggaagccgctgctgctggccggtaatgcgggcatggtcatcagtctgctcgtattggccgcggtcaatctcttctttgaacattcagcagccgcatcatggacaacggtgatttgtttaggcctgtttatcattgtgtttgcggtcagctgggggcctgccgtgtgggtcatgcttcctgaattattcccgctgcatgtccggggtatcgggacgggtgtctccactttgatgctgcatgccggaacattgattgtctcattaacctatccgatgttaatggaagcagtcggcatcagctatttatttctcatttatgccgcgatcgggatactggcattcctgttcgtccggtttaaagtgaccgagacgaaggggaaaagccttgaagaaattgagcaggatctgaaaagccgtaacggaggctcgggatcagaatcaaatcggcggacagttcattcgtaatattcagttttaggggggcggttatttcaccggcccctcaaaacggatgccgagcgggcgcccggtcacataaatgacggggatatgtcatacgttgtataaagtcacgataaaggcggggatgccggtgaaaacgagtattattatccttacatataatgaacttgagctgacgaaaaaatgtctggccagcattgaacgatacaccgacaaagataagattgaactgattatagttgacaacggttcctcagacggaacgagagaatacatatcaaatctgcctgacgtcaaagtcatcctaaatgaaaaaaacctcgggttcgccaaagggtgcaaccagggaatcgaagcggcagggggagaaaatctgctgtttctgaacaacgatacgatggtcacgaaaaattggctcacctccatgctgagggtgctgtatcattctgaaaaagccggtatggtcgggcccgtcagcaactatgtcagcggcgcgcaaatgatccatgacgcatatcattcgcttgatgagctggagtcattcgcggaggcgtattgcgcacggaaaaagcatcatacaaagcgggtgctgcgccttgtcggcttctgtcttctggtgaaaagaagcgtcattgaagacatcggcccgttcgatgagcaattcggatacggttcttttgaagatgatgacctatgtctgcgcgccctgcaaaaaggctacagcctgcacatcgccctcgatgcttttgtgcatcaccacgggcacgcgacgtttacggctaatcaggatatcaatatcaatcagttatattcggagaaccgccagcggtttacggaaaaatggggcactgattttacgtactttactcatccgagaccggaaattgcggagctcgttccccgggaggcgaaacggatacttgatgtcggctgcggggcgggggctacggggctggaacttcaaaacagacagccttgcgaactgtacggaatagaactgcacccgctggcggcgcaagcggcaaaagggcactatgaagcggtgctgcaggaagatgtcgaagaagtgaagctgccttatccggaaggcttttttgattgcatcattttcgcggacatccttgagcacttaaaagacccgtggcgcgtcattgaaatgtattcatcctatttgtcgcctgccggatcaatcgtttgcagcattccgaatatttcccacgccgaagcgctgttcccgcttctgctcggtgactggacatacagagacgccggcattctcgaccgcacccacttgcggttttttacgccgcagacggtgtgcacgctctttccggaagagacatttgctgtgaaaaagcagtcctatacgtatgttcacgtggatgagcgggtgcagctgtttttacaggaaatcacacgaatggcgcaatcgatgcaatttccggtgacacagctgcccgaacaaagccggatttatcaaattctcctccgtgtcgaaaaaacaggctgaaggctaccgtcccatcgttccgaagttggtaatctgaatggaaacatcatagtcaaaagccgcttcggagaaggtctcatcccaatgatgctttactttcttccaatagtcgggatattgaatgcggactctgtcagaaaagaatacagggtccgtttcatattgattctgcagcttatcgatgacttctttcacatcgcttttcagttttttttcgaaaatcttttccagcccgtttaaatagtgctgatcgaatgaatcttctccggcatattgatcctctgacaaaagtccttttgtttttaccgctacatgaaatgacagcttcccatttttcagcctgggagtgatggtagatgttgattttttgatctcgaaggtaatcgggtgcccccctttatccaaagcgggcagcacgccgccccgtatcgtccccatcagccaattcaggctctgtatttcgtatgatgacagaaagcccgccaatctgttttgttttgcgtttttgataatggccgctccgtcatacaccgtttttcctttttgattgctgacggcctgaatgagaaaactgagtttattatggcagtaaatcgaagctctcccgattcggagcggttttaaaatcttcccgttgtagccgccgttgttcgtaaggtcgatcagcttttccgcggccatgggctgctgctgattcggcgtcggctccgtcagaatatcggacgcttttcctcttgccgcgaagagatagctgctccgccgtaattcatcatcgcggataaaatgattcatcatctgcagtatattttggtcggccagcaatttgtcgctgaatatcagcacctttaaatgatcgctgtaaacgggtggatcttttaaagagacttcactgacggcttcaagtatggtatccccccgcgtcgtcacattgacaaacatgggccggccggaagcctggctgttttcgctttggggcagcaggttttgataggttaatttatatcggcggtcactcgtctcgtctatcgccagcccccgggcgaaagacagcttttcgacttccttcgcgtcccagcatcctgaaagcgtcatcagtatgaaaagcgcagccgcccattttatgaaaagtgtcatgacgtctgtttcctcccggctatttttttcatccagctgacaaaccagatgagaaaaggaatcataatgacggcaaaaaacgcatatccgagaatattcgcgaatgcaaacacactgttgatatcatcggggtacattgaaaggccgaatgtcactgccaataagcctcccagcagccaggcattgtttttatttttcagtttgaaaatggtgtttaatccgagatgcgctcctttaaaagaaccgagcatacaagtaaactgctggcatgtccacgtaattaaaagaaagatatcaaaccgctctatgaaaatgccccggatttccaaggcgtgaatcagggaaatggtcggatacgtcaccgttttggcttcagcgaccgacatacagccgatgacgacaagcagcgtaatgctgtaaaataaccctgcgcctgcgatgccgaagacagcagcctttttcgcctgcttcggatttttcataaacggcaccagatacagaatcacctcaagtcctgaaaaatacaaaagggtccgcggaaacatctcaaaaaagcttttgtagcctccttccatgaccgggcggacgaaatccagattaaacagtctcaggctgaatataagcagcataatcagaatgacgatcgtaaccgggaacaaataggcataaagctttgaaatgggatagaccccgccggtcacatggtagatgccgaccgccagaaagatgaatatgacggcacccatcggcgtatttttcagtaaaaagtaattgatgacttcaccgagaaaacgggcttgaaaacagacggtgacgacaaaataacagctgatgaataaattcagaagagaaccgatagcgcggcccatgatgctttgattcagctcataaatggtttccccgctgtttttctgcaaaaacggcataaagagcaggacgatgccgataaacacgacactctgcacaagaataatgatccatccgctcggactgtccgctgttgcggcggagcgcggcagtgttaacacgcccgctccgatcattgttccgcttaccatgagaagtgtctgcataaacgacagcttgtcttccggttttttcatggggatcacctttgcttgattttatctttcgtctcttttctggtcggccgttttttcaaaagaggcgtcggcagtctgacgatcgtatcttttaagtcttggccaggatgcgccatgatcggaataagatagtcctggccgaagcttttcagacgcatcagatggccgatgacaagcagatagcacatgatcagtccgtataaacctaatatcgccgacagaatcattgaaaaaatacggatgagcctcagcggaaaattgaacgcataggagggcgccgtaaaagaagccaacgccgtaacggatacgacaataaccatcatcgcgctgacaatattcgcctgaacggcggcctgcccgatcaccacgcccccgatcaggccgatcgtctgtccgatcggcttcggcagcctgagtccggcttctctgatcatctcgatcgtaaaaatcatgatgaacgcttcaacaaaaggagggaacgggacattcaatctgctcccggcaatcgtaaccgccattctcgtcggcaaaagccccgtgtgaaacgtaacgagcgatatgtaaaggccgggtaaataaatcgtgattaaaatacatgtataccgaagcagcctgagaaaggtaaccggaacccaccgctgattataatcgtcaggggagtggataaattcatcaacggtagccggcaccaaaagggtaaaaggcgttccgtctacaagaatggaaacccttccttccaaaagagcgcccataacccggtcgggccgttcggtcgtcaagacggtcgggaaaatagaatacgtgttatcttcaataagctgttcgatcgctcctgattccggaatgtcgtcaatggtgatggactccagtcttttcatcacttcttttacaacatcatcaggggcaatatcccgaatgtaggcaacggcgatccgcttttttgtacgttcgccgattgtgatctctttgatctggaggttgggatcaccggactgctcgcgcaacagcgccgtgtttgttcggagcttttcgacaaaacctatcctcggtcctcgttcaagcacttctgaagacggttcttcaatatcacgcattttaaatgtttccgtctcaaacgaaagggcttcctcccatccctccgccagcaaaaccgatttgccggagaaaatgtctgcctccgcgtccttaagtgaagaaagccgggtatgacgatagccgaaagagatggatgacggcggtgtttcagccggttcctcttgatgccgggcggccgcctgcacgggcgaaataatatattccgcaagcaattgattgtcggtcagtccgtctatatatataagacaggcgtcacatttgccgtttccgtacgtaaacgaataaaacatcatgtcatcgctttggccgaaccgttttttcagcacttcaaggtttttgccgagctccgcatgtatcgtcacaatgttcccccctttttccatcagttattttaatttgcgacaaacaaggcattttattctggaataggaaatgactgagcattccgccccatccgaatggtataatgagcaggtcagccattttatacatattgtttttaactgcggctccctccgtgttttaaaaaaaacacagggggaatgggatatgagccgctttttaaggggaggggaacgaacatgacgcaagagccgatttttttacagcctgtatataaagaaaaactatggggcggcacgttattacgcgaacgattcggatatgacataccttcagaaacaaccggcgaatgctgggcgatttcagcccatccgcacggaatgagcacggtcaaaagcggtccgtatcaagggaaaaccttgatggaactgtgggatcagcatagagaattattcggcggaacggaaggggaccggtttccgctgctgacgaaaatactggacgtcaaacatcatctgtctgttaaagtccatcctgacgattatgacgccgaggagcatggactgggcgaaacggggaaatctgagtgctggtacattattgactgtaaagaaaatgcggaaatcatatacggtcacacggcccgttcgaaagcggaacttgtcaccatgattaacagcggtgactgggaaggcctgctgcgccgcgtgaagatcaaacccggcgatttttattatgtgccgagcggaaccatccatgccatttgcgcgggggcgctcgtgcttgaaacacagcagaattcagaggcggcctaccggatatatgattacgggcgtacagatcaaaacggccagccgcgtgagctgaatatccgcgatgccgtcaacgccgccaccgttccgcatgtggacggatttttggatgaatcaactgaaacgagaaaaggcgtcaccatcaaaacctttgtgcagggagaatatttttctgtatacaaatgggatatcagcgggacggcggaaatgacccaggacgctccgtttatgctgtgcagcgtcacagaaggaagcggctccatcatctgtgaaggcaagtctgccaagcttgaaaaaggcgcgcatttcatactgccggatcagatgcctgactttacgataaacggagattgcacgctcatcgtttctcatatataaaaccaaacttaatcccagctctgggattaagttttttttatttggaaaattgggtggtttctctctgtaaaaatgaagaaggccggccgataaataaactagtttgatagaaaccaattgaatcagaaagaggagaaggaatgaaaaagagattcgttgcacctatgttattgtccgccgttttccttgtcttttgcacccttacacagcccgctgaggccgcatacagcgactactccgtttacgagctggaaacgaagcagcaatttgcttctgagaacggggcgcttcaagcggcagcgaaattgaaaaaggatacggggtggcaggctgacgtaaagaaagccggaaatacgccgctcacttatcaaatctcagcttcaggcttacacgatgaaacggatgcgaaaaccgtgctgaaagattttacgaagcagacgggcgtgaccggcacttacagcgcaagcggaagcaaacagccgtacgtgaccgtcacatcaggcgttctatcagacgagcggcagacgaaaaatcttcttgccgaactgacgaaaaaaacgagcgtgaccggcgccgtcaagccggcggggacaaaacagccgtacatgcaggtcgtgactgctgagatggcggccgaagcggacgcaaaagcgctctcgcaagcgttgacgaagcagacgggcgtgaaagcgtcataccgtcaggtcaaacgggaaacagcccggtttcagatccaatcaggaacaatctccggcgatcaaaaagccgctcaaatccaaactgattttcaaaaggaaacaggattgcagtcgtcgctgaaagtcacggcaaaggccagtccgaatatcaccgtgacagcctctgacatctcaaacgcaaatgttgcggcaggtttagcgaaacagcttcagcagaaaacgggcgtcaaagggaacgttcaaaagtatgcccaaaacaaaacagcaaccgtgtacaacgtgcagtcaggatattttaacggagtaagcgccgtacaaaatgctatcacccaaatcaagaagaatacgggtgtcagcggaagctatcaaaaagccggcaagaaaaataattatacggtcgggatgagcggactgacggctaagcagctgcaaagtgttcaagctttctttaaaaagaaaaaatggcattgcgacgcatcgcctgtcaaaaagacagcaacagtgtccgtttatcggatcacggcagggcagcttaccgctgcacaggcagatcaagcggaggcgtttttccgccagcagcatgtaaagacggcaagaacagcggcgggaaaaacagcagaaaacgaatatcagctgctttctcagcagacggcagaccagtcgaagataaaaaaaggattgaatctgctggcgggatataagctgactgccaatacaaaaacgatatccaagcagacggacacaacgtaccaagtcacaaccgaatcactgcttgatacggcaaagatcaatcgttcgctggactttttcaaagggaaaaaagtatccgcctccgcacagaaaacaggtgaagcggcgtatacacaattcagaattgaaacggcaccgctgcttaaaaaggaagacattgaccgcgtaactgcttttttcaagcaaaacaaagcggccggaactgtgaaggagacggggaaaaccggctctgcacagtacgtcatcaaaaccgaaacattcagcagtaaaaccgttttaaataaaagcatgagctttttcagcgccaaacaattacaggccggctatacgagtgaaagccatccggtttatgaactccgcattcgcgatcaattcacgggagcgcagtcagcggacgccgcctcccaaaagctgaaaaagctgtacggatggacgatggctattttgaaaataaaaaacggaccgcaaatcatgaataccaattacaacatctcgctggcagatatggtcaaaaaacaaatgacagtcagcccgcagactgatgccgcggcttatgcatcgcttacgtacatcaatacggcctccggaacggtcacagccgacgtcctgaacgtccggtcaaccccggaagtcagctccggcaatattatcgggcagttgaaaaaaggcgataaagtcagcatcacaggccagacaaacggctgggccaaactcagcatgggctggagaaacgccagcagtgacgaagtcgggcagtatgtcaatccggctcacttcgcacaagacagcaagtattactttcaatttctgaagctctctcaggcagccggactgaacgcatcggaactgaatcaaaaagtgctggtcaataaaggaatactgacagggaaaggccaggcctttattacagccgccggcaaatacagcatcaatgaagtgtatttgatttcgcatgctttgcttgaaacgggcaatggcacgtcagagcttgcgaacggcattatgtataatggtaaaaaggtttacaacatgtacggcatcggggcttatgacagcaacccgaattactacggcgcacaatacgcgtataatcaagggtggtttactccggaagccgcgattatcggcggagcccaatttatcggtgcctcttatattcacaatccttcatacgagcaggatacgctgtataaaatgagatggtctccagccgcggcccatcagtatgcgacagacatcggctgggcgtataagcaggtaaaccgcatgtacagcttatactcactgctggatgactatacgctttactatgatgttcccgtgtatatgaaagtataaaaaaagggctgagtgtatgcttcagccctttcttcatgcaaaaaacacccgccgtcggattcaggcaggtgcttcagcacaatttttcatttttgtttccgcaaatttcaataacgcttcactcgaattcccatctgaatacatattccatttgtccgagaaccgcttcatttcttctgcacgaaatggctttttcgtcatttcctccagaagggcttcgctgtcatgacaagcctttccgggaatgacggaagtataattgtcgattaaaccgcgtttttgatcatattcctccagatcatatgtgaaaaagaaaatcggtttatttaaaagcgcgaattcaaaaggcacggaagagtaatccgtaattaaaatatcagccgctttcaagagatcatgcagacgcatgtcagacacgttcttgatcaattcgctttcaaacgaagccgaaatatgttgcaaaacggcaggatgaagctttacaagcagcatatactctccgtttaacgcgtttgtgagctgttcttcggtgaatggcagccgaaaggattgcatatcataatccctgaatgtcggtgcgtacaagatgatttttttcggccatttgtgcttcagttcaggcttgtcttcataatagacgtcagtcagggggacacccgtttttaacagctggccgtcccgtatgccgaacgactttttaaaaacgtcagccatcgcgtctgagccgacggtgacaaagtcaaacgagcggtacacttttttaaaacggctgatgtctgatgccgggcggttttgattcgtcacatcctcaaggccgaactttttcaaagagccgttcgcatgccacacctgaatgcatgtcgtttgcggccggcggtttaagacgcttgtcatgaggaaatagttatccgttatcaccactttgctcttaaaaaggatcaaaacagccttcaaaagatgcagcggatgtttttcgttcagataaaaagagccgataccttccacctcttttttcagactgacggcgtgtctcgtatacacaaccgtcacttcataagaaagcgattcagcgtgcgctttgtaagaacggatgagagcctgcgcattctcttcaaaagataccagcagggtcaaatggttcttgggctttacaggcttgaacaaaacgccgagaacagacagatatatagaataaaaagcggcgaataaagatcgcaagttcatagattaccaatctcttttgctgttttatttgtttaaagctgtttcgtttgatcttctgcctgcttggaatacaggcttttatttgatttattatttctcaaaacggtaaaagcatacttcggaatgttcagcatccttttccatctccacggattcgtcaccagtctgtacagccattccagattcgttttaatcatccattcaggggcgcgtttcaccgttccgctgaacacatcaaagcttccgcccaaaccgatcgatacagcctgagggaaaagatgtttgtattcataaataaattgttcctgatggggatatcctaaggcgacaaacacgagatcgggtttcgcccgggaaatctgtttggcgacgaagcgtttatccgcttcataaccgttgctggctccgacaacctcaatattcggatactctttgctgatccggttcaaaacggcgtcaagcacgtcttgtttagctccgtataaaaatatttttttagactgccggtttgcgaggccgagcagcgcaagaaacacatcgaatcccgcaattcttgatttcagcgggtgctgcgtcaaacgtgacattaacacgacgccgataccatccggcaggacgaaatccgcggatgaaatgacttgatgataacctttgtctttcgccgcagcgtatccgatctcaggattgaccgtcgcaatgacggctccttgcttttgttcgatataataagtgtctaaatatgaaataaactcctgtaaatttccattaacataagaaaggttgtgcaccatttcagtctgcatctgccgtcctcctttttgtacgggattttctttcactttttcgtgacttaggctaagctttattttaacataataccttcagataaacttaacaatagttttacaaaaatataaataagataacaatttctttaatcacacgcgcaaaaaccctgctaaactcctattgtaataacatttgttaataagtggattttaacttcgttttacattggcttaaccttttcagggctatgtgatataatgaggttccatgagtacgaaattggcactttagtgattaaggatacagctgcgcagcatttcagggcagttgcttgttatacgtatgatgatagaaaggagcttttgtttcatgaagaaggtcattacttacggtacgtttgatttactgcattggggtcatattaaactgcttgagcgcgcaaagcagcttggggattaccttgttgttgccatctcaacagacgagttcaacctgcaaaaacaaaaaaaggcctaccacagctatgaacacagaaagctgattctggaaacgatccgttatgtcgacgaagtcattccggaaaacagctgggatcaaaaagtacgtgacgtagcggatcacaacatcgatgtgttcgtaatgggagacgattgggaaggcaaattcgatttccttaaagatcaatgcgaagtcatctacctccctagaaccgaaggcatttccaccacacagattaaaaaagaaattgccggggtgtaattgaaacattcggatatacagatgataaagaagtactccctccggatagggagtacttcttgtaatataaggttattttcgctatatttgttatgcgcttttgaaaaaaagctagacaataagaggagaatttaaagatgaatcttagtaacttttttaagttgaataaaaaagagtccaagccgtccgtagaagaacgcgaatataccattttaaacaaagaagcattggcggaagagaagaaggtagcggtagtcgttcctgtttataatgcagaagaatatgtaaggaaaacagttgattcagtgatccttcaaaacatcggctttcagcatatttctttaattctggtcgatgattgctctactgatgattccagaaacatcctgactgagtacgccgaattgtatgaaaatattacagtcgtctttttgaaagacaacacgggaactccggcttatccgagaaacttgggaattgagctggcaaatgcgaagtacattacatttttggatgcagatgattggtttgcgccgaacggagttaaaatcttattcgacatgctcgaaagagatcaggtaaattatgcggtcggaaaaacgatcgaaatgcaggtgaacggtcaaaaaacgatcgggaaacatgagtcttcgctgaacagagcgaaggtatcgcctttttcaatccggcatattttctatcatctcggcccgcgggcaagaatgatgaacttacaatttctaaaagataatgatatcagatatccggaaatgaaatttgctgaagataagcaattttttatggatgttcttttggcgtgcggagatatttcaacgtcaaccgaaccggtctattatctgaacagaatggacaataatgagtcgctgacaaagcagactaatataatggaaaaaaccgatacgaacatagccgtaatgaagtatattctgaacaaaaaattagatactgaaaaagagaagatggcgatgaaccgcctgatcgaattcgattccattacgcgccttttcgatcggatgcacttcctgaaaagcgaaaacaaagaagcctactacaataaattcaatgaaattctgaatgtgttaaagaagacgaaatacgatatttctgagacattttttcatccgattcataaaacagccttccgtctgctgactcaaaaacggtatgacgaggtcgaaaagctgttccgctggtccaaaaaagagcccgataaaaacatcgtgacgaaaggcggactggcttatttagaaagcccgctgacggatgaagaaaataaactggtcgaacttcgcatgcacggagaaacggaaagcgcggtgttcgccgatcataaattcaccgttacgttccgcttgttcggacaggacagaaataatgcccattatattcagtttcagcacagagataacatgaaagtattccaccagtttccggttcagtcactgggagacgggcggtacgtccttgaaatcccgttaagtgacattgaaaaagtcggacttggcggttatattatgtatgtcatttataacgattatgaacgtgtcatgttaaacagagaagacggtgaaaaggtgacggcagaagtgaacggactgcaatatcaattctaccggacggtgaaggagaacctttcgctgaaagtaacaaaatgatgattgtgattggatatgtttaattgaaacagaggagtagacttattttatgggtatagaaaatcctgtcagatacaagttaaaacatcttaacataaaggaagagacattcagcattacgatatcctgtgaaaatgtcactgcaggggaagagccttctcttcagattataaatcgtaagacaaaagcggaactttccgtccctctgaaacggttggcaggagaaggcggggagtaccatgctgtcatgagcacggatctgctttctgaccatacggacggcaaaggatgtctggatttctatgtctcctttatcaatgatgacagtgatattagtaaaaaacggttaaaatccagccttgaacctattgaactgtcttcttataaagatgaggctcatcatatgttctttttcccttacacgacgaagaaagggaatttctccttaaagctgctgcagaaaaagttcgtcacgcggattgatgaaatggagctcgaatctgacggcagcttacatctgaaaggttttgcattccggctgaatgcggcagaagccttaaagataaaagaaaaaaacctgattctgaaaatgaaaaaaggaaaagaagaggagcctctcattctgaagtatccgcttcacgacgtgccgagacacgaccttgatgaatatgttcaggacacaacgatgcttgacacgataggctttgatacaaaaattgatttgaatgccgtttataaagaattgaatcagcagctaacctttcaattccatattcaattcatttttgaagatgtcgggacgggtgaagagattatcaccaacagcaaaccgttaaaggttctgaaatctgaacatgtaaaccctaaccaattcacgattttgaaaacggagaaagggcctgccagatttcacgttttcacgaaaaagaaaacgaaaaatctccacctgagaatgaacgattacagcttcagcacccgcgtggagtattttgtgaaaggaaagctgaaacggggcgcttcctttgtacgcaagagaaagaataagctgaaaaagttcattgagaaaagaatacaaaacacttataaagcgggattcagggttgcggggaaactgcctgtcaaacagaaatttgtcatgtttgaaagctttgccggaaaacagtacagctgcaacccgcgggcgatttatgaatacatgagcaaagagatgccggaataccgtctctgctggagtgtaaaccccgcttactcacagacatttaaagataaaggaattccttatatcgaacgctttacgttcaaatggctgttcgccatggcaagagccgagtactgggttgtcaacagccgtatgccgctgtggattccgaaacctgagcatacgacatatgtccagacatggcatggcacgcccttaaagcgccttgcagtagatatggatgaagtgcatatgccgggaacaaacactgaaaaatacaagcgcaactttacgacagaggcttcaaagtgggattacctgatttcaccgaacgcatattcaaccgaaatattcgcccgggcgtttcagtttaataaaaccatgattgaatcgggatatccgcggaatgacttccttcaaacggataacagcccttctgtcatcaaagcgctgaaagaaaaaatgaatcttccgcaagataaaaaagtgattatctacgcaccgacatggcgggatgaccaattttataagaagggaaaatacaagtttgatcttgatttagaccttcatcaattgagagaagcgatcggcgaccgttatgtcattattttacgaatgcattatctcgtggcggaaaactttgatctcggaccgtatgaaggatttgcttatgatttctccagctacgaagatatccgtgagctgtatatggtctctgatttactcataacggactattcctctgtcttttttgactatgcaaatctgaaaagaccgatgctgttttatgtgcctgatatcgaaacgtaccgggataaactcagagggttttactttgactttgaaaaagaagcgcccggcccgctagtcaaagaaacaggtgacgttatcaaatgggtcaatgaaacggaatcagatgattataagcttccggattcgttcgggcctttttacgagaagttctgttatttagaaaccggagaatcgtctgaaaaagccgtaaaagtgattttcggggacaagtaaataagtgcaaaaaagcataatttaaccacgttaattatgcttttttgcttaagtgacggcatgttgcgctcattggactcaggcttgttatgaagtgaaaaatacatcgtaatctgttacaattatgagcggtgcttttgtaagtcaaagctattacctaaaacttacgactaaggaagattagaatgaatgcattggtaaaaattctgaaagagcaattcaactcatttccgctgattatgcggcttgcagtgtacgaaacgaaatcaaagtatcaagtgaactatttgggtatattgtggcagtttctcaaccccatgattcaaatgctggcatactggttcgtatttggtctcgggattcgcggcggacatgatatggtgcttggaaatggagacagcgtaccgttcattgtctggatgctggccggcttaattccttggttctttatcagtccgacgatactggatgcatctaacagcgtttttaaacggataaatttagtgtcgaaaatgaactttccgatcagttcactgccttctgtagtgatagcatcgaatttattcagttattttgtgatgatggggatttatattattgtgctgctgagcaacggtctttttccgacgctgcattggctgcaatatatttattacctgttttgtatgatcagttttatgtttgctttcggcctgtttaattcgactatcagcgtattaatcagggattaccagtttttgcttcaggccgtcacaaggctgctcttttttcttctgccgattttttgggatattgcggagaaatttggaaacagacctgaagttttgaccatcttgaagttaaaccctcttttctatattatcgagggctttagagacagctttatggaagggcagtggtttttccacgatgtgaaatacacgctgtatttctggtttgtcacactgctgttgttaacagtcggttcacttcttcatatgaaattcagagataagtttgttgactttctttaatatagtaaggagattatacgatgaaactaaaagtttcgttcagaaatgtttcaaaacagtattttctatataaaaaacagtctgacaaaattaaaggattgtttttcccaaacagaaatcaaaaaggttttttcgctgtccgaaatgtttcttttgacgtctatgaaggggaaacgatcggattcgtagggatcaacgggtcgggaaaatcaacgatgtccaatctgcttgcaaagattattccgccgacaagcggtgagattgatatgaacgggcagccgtctttaatcgcgatttctgccggattaaacaatcaattaagcggtaaagacaacattcgtttaaaatgcttgatgatgggtctcaacaatcggcagatagacgagctttatgaaaaaatcgttgaattcgcggatatcggcgactttatagatcagcctgttaaaagctattcaagcggtatgaaatcccgtctcggttttgccatatcggcgcatatggaccctgacatccttattattgatgaggcgctctcagtaggggaccagactttctatcagaaatgtgtggaccgcattacggaatttaaagaacgcggcaaaacgatctttttcgtcagtcattccatcggacagattgagaaaatgtgtgatcgggtggcttggatgcattacggcgaaatgcgcatgttcgacgaaacgaaagctgttgtgaaagaatataaagcttttgtggattggttcaacaagctttcaaagaaagaaaaaaagaaatatcaaaacgagcagattgaaggcagaacgcgggcagccgaggaacagaaaatcactcaggcgcagcaaaagaaagcgaagcctaaattcattgccaatacgatacagattacgctgcttgcattgctggctgtcggcgcaggcgcttcgatgttttcagacaagcctctgcgtgcgatcacatctttcggtcacgtcaaacagagcgatgccggactttatgagtctgtgaataaacctgctttggtaaaagctgaaaaggcggacctttatactgaaaaagatataaaaggaaaagcctccgcaagtgtaagtttcggcacgaaggtgcaggtagaagccgaaaataaccaggcggccaaagtgaaattaaacgataaagagtactttatgaaaaagactgatctgtataaagtgaatgctttaaaaaagacggatgttcagcttaatgatttcagcggcagtttatcaagccaaacagcagaagagtttctctcatatctcaataaaagcggggacgatgtacagattaaattgaaaaatccagctgccggacaaacggctgacggacggaacgtattaaaaacatccgatgcaaaaacggaggtagtgattgacaatgatacagtctccgaagtggtttttcatttatcgcgtcctgcagacatctcagctttaagtgaaaaaggcggcagcaaaatcaatcagaatttgctcatgcttaaaaaccaggaatatactttttctgtgaacaatgctgatcaaacactgacggtaacgtctaaaaagtaaagatcacataaaaaaagctgccggattcggcagctttttctattcgtcagcttcttctttttcaagaagatccttcatgaacggaattaatttatggcggatatcctgatcctgtaaggcgaattcaagtgtcgtctcgataaatccgagtttttcaccgacatcgtaacgttttccttcgaaatcataagcgaagacacgctgaatgtcattgagcttttggatggcgtccgttaattgaatttctcctcctgcaccgacttcctgctgttccaggtacatgaaaatttcaggagtgaaaacgtatcttcctaaaatagccaagttggaaggagctgtgcccggttcaggcttctctacaaaatttttgacctggtaacggcggccttcatttgttaacggatcgataattccgtagcggtgtgtgtcgctttcaggaacttgctgaacaccgatgattgaagacaatgttttttcgtattcatccatcagctgacgaagtcccggtttttcagcctggacaatatcatcgccgagaagaacggcgaaaggttcatcgccgatgaagttgcgtgcgcaccaaacggcatgaccgagtccttttggctctttttggcgaatatagtggatatccgcaatatttgacgattttttcactttttgaagaagttcaattttccctttttcttctaaattgcgttccagttcaggggcattgtcgaaatggtcttctattgctctttttccttttccggttacgataataatatcttcgatgccggattcgacagcttcttcgataatatactgaattgtcggcttatcaacgattggaagcatttctttaggcattgcttttgtggccggcaaaaaacgagtgcctaaacctgctgccggaataatggctttgcgtactttcttcactgaataacaccatccttgtttctgcaaaatctttttttcagaactataacctagtctttttccactttaccacaattgattaaaattcacaccttttaatccgctttcaaagagtcttgtaacggtttttgctttgtttgccattaagctttacaatatctaagaaacggcataaatatgttaacatgaagggatatccgacatataaaacgaggtgcagacaaaccgttgaaaaaactaaaagtaatgaccgtattcggtacaagacctgaagcaattaaaatggctccgctcgtattagagcttgagaaatatcaggaaattgattcgctggtgactgtaaccgcacagcacagacagatgctggatcaagtgcttgaagcattcagcattacgcctgattttgatttgaatattatgaaagagcgtcaaacgctttcagaaattacatctcatgctttgctgaaactggacaagctgttccaagaagtaaaaccagatatcgtgttggtccacggagatacgacgacaacgttcgccggaagccttgccgccttttatcatcaaatcgctgtcggccatgtggaagccggtctgcgtacgcaaaataaatactctcctttccccgaggaaatcaaccggcagatgacgggcgtgatcgctgatgtgaattttgcgccgacaagccaggctgaacagaatctgcttgctgaaaataaaaagccggattctatatttgtcacgggaaatacggcgatagacgcgcttcaaacgacagtgcgggaagactattctcatccgatttttgacaagctggacggaagcaggatgattcttttgacagcgcacagacgtgaaaatttaggcaggccgatggaacagatgtttaaggccgtcagaagagtcgttgaggagtttgaggacgtacaagtcgtttatcccgttcatttgaatcccgcagttcgtgaggccgcagaagcccatttcgctgattcggacagggtgcatttaatagaacctctggaggtcgtggatttccataacttcgctgcgaaagcaaatttcattttgaccgactcgggcggagtgcaggaggaagcgccttctctcggaaagccggtcttggtgcttcgggacacaaccgagcgccccgaaggagtgaaagccgggacattaaagctggcgggtacagatgaagaaacggtgtatcagctgacaaaacagctcttaaccgatcagactgaatatgaacggatgtcaaaggcgtcaaacccttatggtgacggatcggcttcaaaacggattgtggaagaactgctttatcggtacggctatagaaaaacccgtccgcagccttttacagaataaaaaaactctgcatcatatgcagagttttttattatttcaggctttcttttaattcttttttgactgaagcgaggcttgcttcatctaatttgtaataatagatattgttgattctcgttcccgttcccttcagttcatgctgagtgactttgctgcgggcgtttttatagtcagtcataaccgtccacatatcatcgaatgacatgtttgttttcatgttgttttcaatgaccttaaacatatctccgaattttgtgacagacgagatgtttgcccctttagaaataatcccttcaatcacttggcgctggcgctgctgcctgccgaaatccccccggggatcttcttttctcatacgcgtgtaggcaagcgcttcttcgccgttcaggctgatgttccccgttccgaaagagtgcccgtcgtagttgaaggcaaacgtgctgttcaccgtaatcccgccgagtgtatccacggtatctttgaagctctccatgtttactttcacaaaataatctaccggcacgtcaagcaggtcctcgacggtatccgcggccatctgcgttccgccgaaagcataggagtggttgattttatccatcgtacctttgccggagattttcgtatacgtatcacgcggaatgctgaccatttctgttgtattcgttttaggattgacggtcatataaatcatcgtatccgcgcgccctttgtcatttttccgctcatcgacgcccatgattaaaacagaaatcggatccttctttccgagatctatatccgtgtcacgtttgtccgattttttcaagtcttcctgaatgcttgccaccgttgaagccgctttgtgccacaagtagtagacgtagcctcctgatgataaaactaacagcccgatgattgttacgattgtcagaagaacttttttcttctttctttttcgttcagctctcatttgtcatcaccttttctattaactttcctgatgcaatttactaatctttataaacccagtcatatttttacttataaccatgtaatagacgaaattcttaaaaaaaggttacaaaaagaccttaaaattaccttaaaaaaaagttagtataagacgatacataaagatgaggtgaaaaaaatgaaaaaaactattgcagcttcgttcttaatactgcttttttctgttgtgttggcagcgtgcggaacggcggatcaatcaaagaagggaagcggttctgcggagaaccaggctcaaaaagaaacggcatattatgtcggtatggcggatacgcacacaattgaagtaaaagtggatgatcagcccgtcagctttgagttttctgatgacttctctgatgttctgaataaattcagcgaaaatgacaaagtcagcatcacttatttcacaaatgataaaggccaaaaagagatcaaggaaatcgagaaagcaaaataatacaccatgatcagcaaaaggcgggataaaaattgaagaaaacaatatgggctgtctgtttttctgtgatattcagcctggctttattaccggaaagcacttttgcggccagttctgatatttcagtaaaactgacgaattatattggtaataaatcgactctgaatatcgaaccttcaggaacttataaactgacgggaagcgatgtctcctccgttgtcagattaggaggcgcatccaaatatgatacggctaacactgcgacatctaagtattggaaaaatccgtccaacgtggtcgtcgttaatacggacgcttattttgcggatacgctttccgtcattcctttagcgaataaactgaaagcgcctgttctgctgactgaagcgaaaaaactgagcagcagcacagaagcgcaaatcaagaaattcaatccggataatattttaatcatcggcgggacgaacagtatttcgtcagccgcggaaaagacattgaagaaatacggccgcacgaaacggatcagcggaaaaaacagatatgatctgtccaaaaatattgcggccgaaatgggcagctatgaccaagcggtcgtagtaacgggggatgtttatacggatgcgctggcaatcgcgccttatgctgcgcaaaacggctatccgattctcctgacgaaaaaagactccctcccgagctacaatctgcctaaaaaagtaatcatcatgggaggcacttcaagcgtcagcaaagatgtggagaatcaaattaaaaagaaggcctcggtcaccaaaagaattaccggatcaaatagatatcaaatatcagcaaacgcagtcacttcgcttggcatggatgcaagcaaaacggtggctgccaacgggactaaattagcggacatcgttgtcggatcaaatattgccgccgcaaatcacatgccgcttgtatacatcaaaaaaagtgaaacacccgcagacgaggccagcctttttaaaacgaaaggcacctattcttatacattaataggcagcgcgaattcaattgccgattcagttaaggctgcttacgcaaaagagttttatctcgtaaatggaaagacgtaccgtattgaaacgtccggcggcaaattaggtgttgcaggcattaacagcggaaaaacgtctttcaaggcggttccagaaaaatattcaacagcaaacacaatcagcattgacgggaagccatatttggggaatatgagtttcactgcggaatccggcaaatatgtaagacctgttaatgaaaacattccttttgaggactatctgaaaggtgtcctgccgaatgaaatgccgggaagctggccgacagaagcgctgaaagcccaggctgttgccgcccgcacctactctatcggcaagatgggacaaacagtcgcggatacaacggcctttcaggtttacggtggatacagctggtatccaaacgcaaccgcagccgttaacggaacaaaagggaaagtgctcacttattccggcagattgatagatgccacttactcatcaagcaatggcggttacatggaagccggcgatgaagtgtggggatcgaaagtgccgtatttagtagctaaaaaggatacaaaagatccggaaatcagctggtctttaacattgcagaagcagcagctgccaacgggtctggatatgaaaaatcccgcatcctggtggtctaaaacaaacgaagcaaatgccgcgcagctcaacggaataaaaaattggctgatgaaaaataaagaaaccaatgcaagttccataaaaattgcaagcatctctgatctctcgctcaccggaaaaacaaaaggccagcgcgcggaagacgccgcggtgaaggtcacgtaccatgtgaatgacaagtcgaagggctatgtcatgaacaagactgcatctgttgaggtgaaagcgtctgaactcagaacgatgatcggagcttcatcttttaaaagcacatacgccagtgcgtccggtaattcttcgcaaatcacgatatcaggaaagggatacggtcacggcgtaggaatgagtcaatacggagcaaaagaaagagcggaggccggagagccgtatacttctattcttgcgttctattatcctaatacagcacttacaaactactaaacttctgtggaggagatcggattgaaattcatcataaaatgtctccccgtctttattctcggggtcattctatttgtcccttccgctttggctgacaacacggttaaaaggatcggcggaagcacccggtatgatacggctgtactggcggcaaaacaatcatggggtgaagcgaaaacggtcattatcaccggcggaacttcatatgccgatgcaattgccgctgcgccgcttgcatatcaaaaaaatgcgccgctgctgtttacaaataaagatcagctgtctgcgggcacaaaaaagggattaattgatttaaaaacgaaaaatgtgattatcgttggcggcacacctgccgtttcgaaaaataccgcaaatcaaattgctaaattaggcatcagtgtcaaacggttatcagggagcacgagatatgccacagccgcaaaagtggcgggtgaaatgacaagatcttctacagcccttgtggtcaacgggtttgttgatgcagatggaatggctgcgatttcttatgcgtccgctaaaaaatatccgattttatttactaatgattcgacattaaatggttctacgtccaatgcgattaaaagcttggggattaaaaacacgattgtcatcggcgggacaagcagcatcagcagctcactttataataagctgccgaacccttcaagaatcagcggtaaaaaccgctataacctgtctgtgaatcttgcaaaaaagacaggcttaagcacaggctatacgtttgttaccaatggttttaaagaggcggataccatcgtcggaggcgtgctgagcgccaaacaggggagagttcacctgctgacgaatggagacagtctgtcaaaagacgtccggacgtatatcggaagtaaaaacatcaccagcttcaccgtcataggaagtgcttcatctttaagcaacaatgccgcgtcgcagcttaaaaatccggttgtcggcaaaacggtctttattgatccggggcatggctatcaggattcaggtgcaaccggaaacggcttgcttgagaaaaatgtaaaccttgatatcgctacgcgtcttaacaatcaattatacggtgcgggcgcgcttactgtaatgtcaagaaagggcgacacctttgactcgcttgaggagagagtgaacaaaggggcgaaggcgaacgccgatattttcatcagcgtccatgcaaatgcgaatgataacagcagtgcaaacggtacggagacgtattatgataaaacgtaccaatccgcaaacagtctgaggcttgcccaaaatattcagccgagaatggtttctgctctcggcacgcgtgaccgcagtgtgaaaactgccggattttacgtcattaagtattctaaaatgccgagtgtcttgttagaaaccggttttgtcacaagcccaattgatgccaatattttaaaacaatcaacgaaaaaggacagactcgcggcggggatcacccaaggcgtttcctcctatttcagataatatttttcatggaaacagaccggttcataccggtctgttttttatttttcattatgctttgtctcaaatatggatatgaatagatttacaataaaaaaacaataatcgaaacattctaataaacattaacgcttcctttacttccaattaacatccatctgctaaactcacggcataggtcatcaaacatcccaacaaatcgtgaggtgtgtgtcagtgggagcagagaaaagcatgaatgtaaataataactatgcagtgcggcaggggacttccgctgccgttacggaaagaacggcccgttatttggcttttaagcgattcatggacattgtgtttgcgcttgcggggctcttggcggcactcccgatgatgggcctgttctccatactgattcgtttggagtcgcccggcccggctttttataagcaggagcgggtaggcaaagacgggaagccgttttatttgtataagctccgctctatgaaaatagatgctgaaaaatcgggggcggtttgggcgctgaaaaaggatccccgcgtgacaaaggtcggcgcttttatcagaaggacccgtattgatgagctgccgcagctggtaaatgtgcttcggggagaaatgagcctgatcggcccgcgtcccgagcgtcccgtgtttacggaacagtttcaggctgagattccggggtttacggagcggctggccgttaagccgggattaagcggctgggcacaggtcaacgggggatatgacatgacaccgagggaaaaactgatgtttgacttatattatatccgcaacctgaccttttcattggaactgaagattatgctcaaaacgtgcaaagtgatctggaccggtgacggggcgcgataaaaattctggtcagcagacaaaaaagtagggaaaacgatgcctagtattacaaatcaaatcttgagcggcgccaaatggacaagtatttcgacagcgtgtattacggtcattcaaatcgtccaattcgccctgctcgggcgggtcatgtcactggctgaattcggccttgtcggcatgatcacaacggtagtggtgtttgcccaaattgcgcttgatatgggttttggcgccgcgctcattcaaaaagatcatgtgactgataaacagatgtcttccttgtactggctgaatatcataacggggcttgcgctgtttgcgctgctgtttttcagcagtccgctcatcgccgatttttatcggcgggaggagcttgtctatttaatccgcgtgctggccgtcatgtttttaatcgcgccgatcggtcagcaataccagtatatgctgcaaaaagcgctggcatttaatacgttaagcaagattgaaatcttttcaaatgtgctgtccttcgtgtatttggcggccgcggttttttataaggacccgattctcgcctatgtgatttcccaggtgctgctgcaatcgtcaaaaggcattctgtactggatgtcctgcagaaaaacatggagaccggcgttcgtttttgatctgaaaggaatgaaaggcttcttttctttcggggcctttcagctgtcttcccggcttgtgaaccggctcggagcgaatattgatatgattctgatcggcagttttatcggcgccgaggcgctcggcatttacaatctggcctaccagattgtcacgcttccggttttaaaaattaatccgatcattacgagagtcgcgtttcccgtctttgcgaaaaacaagcatgaaaacagcgttatcagagaaggatttcttaatatgaccaaaatactcgcgctgatatcctttccgcttttgctcggtttggtttcagtgtcggatgcattcgtggcttcggtattcggagaaaaatggctatcggctgtcccggttttaaacgttctcgccatcgtcgggattttaagggtcctgatgaatccgaacggatctgtgctgctcgcaaaagggcgggccgatctggcgttttattgggacgccggggtgatgctgctgtatggtgcatctttgtacgccgccgtgctgtccggaaatctcttgacggtagcctggacgtacgctttcatcagcatcctgaatttcctgatcgggcgctggctgttggcatatgtcattaagctgcggctgtcggcttacttcaaagccgtggccaaaccgtttctgcttacggcggcaatgggtgtcatcgcttttacagccagcttcggaacggagcgcatcagccttgatgtcaagctgcggctggtgatctccgtagcctgcggcgcgttgtgttatttattcctgttaggaaaagcttatccgcatatgaaaagtaaattaagaaaaggacgtttgctatgaaggtattgtggatgacaagtgtatatccgagcagtgagaagccgggggaaggcgtttttcatgaaacacaggcgcaagaactgagaaagcttggcgcggagatgaccgtcatttgtccgcggccgaaactcgccgcgccattccgggtgctgaaaaagacatatcggaaaaaggatatcaggccggcacatgaatggcggaaaggcgtgtccgtccaccggccgttttatcaggcggttcccgggcagctgaaatgggcgcagccgcataaaagaatggcgtcatcggttctttccgcgattaaaaatcaaggcctgaagcccgatctgattcacgcgcatttcgccatgccgtcaggcggagcggccgccattgtgtcaaaggctttaggcatcccgtatgtgctgaccttgcatggcagtgatgtcaatgtctatccgcattacagcaaaagcgctcatcgcgcatttacatttgcggtgcgggaagcagccgatatttacgctgtgagcggcagtctgcgggaacaaatgaaaaagctcatcgaagcggagtgcagcgtgcttccgatcggcatcacgcttgacgccttccgagaaaggaacgagacgaaagaagccgtcagaaaacggctcggccttcctccggataaaaaactgatcgtgttcatcggcaggcttgtcaaagagaaaggtgttttcgacttatcaaaagccgttcagtcattggatgaaaattatgaagccgtctttgtcggtgacggtcccgccgcatcttcattgcgggaagccgctcatatcgtcacggggcaagtgccgaacgacaaggtacaggactatctgctggcctcggatgtaatggcgctgccgtcctacagcgaaggcatgccgactgtggtcattgaggcgctcgctctgaaggtgccggtgatctgcaccgatgtcggaggattggcttctttattcgggaaacaccgggggttgctgatcaagccgggttcacctgagacgctggcagaatcgattctgcgatatgacggaggagaggcttggacgccgcaaacagccgaggaactttatcaaaccgtccgcacgtattttgacgcaagccaaaacgcgaaagcgctgaaagagaaataccgatccgtaatgaaccgggccgggcaagaggagaacctttcgaaagagggatgaagctgtgaaaaaaatcgctgtattaggaacagggtatgtaggtcttgtatctggaacttgttttgcggaaatcggccatcatgtgacttgctgtgacatcaatgaagcgaaaatcagaagcttgcaaaatggagtcatcccgatatatgaaccggggcttgaggaattagccgaaaaaaatgtcagtgccgggcgcttatcctttacggccggcattgagccggctgtgaaagccgctgatatcatctatatcgccgtcggtacgccgatgtcaaagacgggtgaagccgatctgacctacattaaggcagcggcgcaaacaatcggagaacagctgaacggatacaaaatcattgtcaccaaaagcactgttccggtcgggacgggaaagctcgtttatcaaatcgtcagcgaagcgtcaaagggaaaatatccgtttgatgtcgcgtcaaatcctgaattcctccgcgaaggttcggcggtgcgggatacgatgcagatggagcgggcggttatcggcgccacaagcgaacatgccgcttcggtcattgaagagcttcataagccgttccgtacgaagatcgtaaagaccaatcttgaaagcgcggaaatgattaagtatgccgcaaatgcttttttagccgccaaaatatcttttattaatgatatcgccaatatttgcgaacgtgtcggggcggacatttcccacgtgtcagaaggcctcggtcttgacagccggatcgggaataaatttctgcaggcgggcatcggattcggcggatcctgctttccgaaggatacaacggctttattgcatatcgcaaacgccgccggctatccgtttcaaatgatggaagccgtcattgaaaccaatcagaagcagcgggtccgtattacggaaaaattgaaccgcgccattggtcccttaaaagggaaaaccgtggccgtactggggctggcctttaaaccgcacacaaatgacgtccgctccgccccggctcttgatatcatcacaagtcttaaagagcagggcgctcacgtgaaagcgtatgatccgatcgcgattcccgaagcgtcagcgatattaggagacggcggcattgaatatcacacagagctgtacagtgccatcaaaaacgcggacgcatgcctgattacaacagattggccggaagtcaaggagatggatcttcagagagtgaagcagctgctcaaacagccggtcatcattgacggcagaaatatgtttccgttggagtatatgagggttttaggattcacttatcattccgtcggacgtccagcggttcatgccgatcggcaaataaaagaactggcaagatagaaaaagatttgtcttcaggctctcggcagcccggctcggctgccggttttggaaaggggtttgccatgtgagtatcaaacgttcagcggcacatgttcttgtgctgcttgccgctctcattacaggaggatttatcatgctggaggcggtcagggcggatgccggcttcggaaaaatcaccgtgctgctgcttgccgccatgatcggcattgccggacttgctttgctatccgcctttacaacaaacggtcagatgtttatggggctcatttatatactgatcgcgtgtacatttttaaaccaggccttctttgcggttcatctcggatttttcagcttatttatataccggctgttattaatcggagctggcgcccttcacatcgccggcatcctgacaaaccgtcatcatattgacagatggaatcgggtgaatgtaaaagggattctgatgtttttcgccttatggtttacatacggtctcctatcgttattgtgggcaaaatccgtgacgtacgggattaaatatttagctttaatgggaatgggcatgtttttgatttatcttattgtcatgttcattcagcgctttgatcagctgatggttttttacggcatatggcttgtgatgaccatttttgtgatggcggtcggcttttacaaccattttacacacaaccatctgccgagctccacgctttataacggcccgcagtacaaacagcattatccgacgtccgttttctttaatcaaaatgatttcgccacctttttgtgcatcagtttctttctgtatgcaacggcggtgaaaaatatgaaaaacggctatgtgaaggccgtcagcctgctctttgcaatcagtgctttgtatttaatcattttgaccggttcgcgcgcgagtctgctgggcatatgcgcgggggcggctgtatacgtcttcatcctgctgccttccctgttgaaaaaactcgcgctgtacgctgcgggagcgggtgttgcgctgtttgcggttttatttgcgggccgtatcaccaatgccgtcttgaatctgttttcagctccgcaggcgataccgggacagcaaccgcttccttccaacctcgcgagggcgaatcttttaaagaacgcctttcactatgtgattgattcctgggggttcggagtgggtgccggaaacgtctcgtattatttaaaagctgagcccgtttatgatacgggcggcgtagttgaggtgcacaactggctcgtcgagattatggcgaacttcggcgtgcttacgatgctcggttacctgacagtctatttgttccttttttggacactttataaatgtcatgaaagaaaatcggaaaatcagtcaagactgatcacagaaggacttatcacggcgatggccggttttttggtaagcagcatcagcccaagctccgtatcaaatttatttttccactgggtatttctctcgctcgtgatcgcggcggtcaatattctgaggcgtttacaaaaggagcctgccgtcacggcgtactatgaaaaacagggagatgcgagatgaaggatatgttgacaagaataacccggcgtatcaaaaagaatatcatttggatcattgcgctgcccgttgtgttaggggcggcgggatatgtattgccgtcaaaaatcagcggaaacagcagttttacatcagaagccgcgatcgccgcgggaaactatgatcatccgctttataacaatacaaaagaaatcccgctcctgttgacgagcgatgcctttttaaagcaggctctgcctgataaaacagatgaagaaagagcggccgtgaaaagtaaactgactgtcgaaacacaatcagattcattgatcacggtcagctacagcggccaaaacaaacaggatactgaatcggtgtttcaagccgtcataacaacttttctgaagaatgatcaggacctgtttgaaaaacgggcaaaagtagtgcggcagagtattgctgcgcttgaaggagaaaccgtcagtgcggacgccaaagtggataaggaacgatttttatacgaattgaaaaatacgcagctgaacctgaaagcggccggcatcatcaattcagagccgatgaatgaaacggcgggacaaggcatgccgccgaaaaagaaagcggttctgggcgttttaatcggcattgcagttgcatttatgttcattgtcattcctgagttttttagagagtccttgtaaaaatctgcgatggagatgtgaccatgacaaactggaaacctttcgtatctgtcattacaccgtcttataacgcaagtgaatatatcgaagacacgatccaatccgttttacatcagagccacccgcattgggaaatgattatcgcggatgattgttcaacggacggaacgagagatattttacggcaatatgaacaaaaggatgagcggatccgcgtcgtttatttagatcaaaacgggggagccgcggctgccagaaatacagcccttaaacatgccaagggccgttatgtcgcatttctggacagcgatgacagatggaaaaaggaaaagcttcaaaaacagcttgcgtttatggcagagcggtcctgcgctttttcatttacgggctacagcgtcatggagcaggacggaacgccgacggacaaaacgattcaagctcctgaaagcctgtcatatgatgaagctttaaaaaacacgattataggatgtttaacggtcatgattgacagagagcagacggggcagattcaaatgcctgatatcagaacgcggcaggatttagcgacatggctttccctgctgaaaaggggatttacggcttacggcctgaatgagtgcctttcagaatacaggcttgtgcagaattcgatttcaagcaacaagtggaaagccgcaagaaaaacgtggtttgtttatagagaaattgagcgcctgcactttatcaaggcttcgtggtgttttatgcaatatgcgaaaaacgcggtcatgaaaagactgtaggcgtcagaggagctgggtgatgaaggtggaaccgattattcacgtaatcgtcggagcggcggaatggggacatgaccggctgagatacagacggcaccggctggctgaatttctcgcccggcaaaaagaaacgaaaagcgtcatttgggtatgcccgtctccgcgagccaatgatggtcagatggccgggatcgccgagggaatccggcagttcactgtaaaggatatcatgcagcaaaaagctttccgcttcggcaggtatacagacatgtgctacaggcataagctttcaccattggtgaacatgctgaaggaagaaggagaaggggcccgctgctgcttatggtacaccttccccggttttccgcttctggcagatatgtttccttgggatgaagtgatttatgattgcagtgatctgtgggccgctccgatcagcggccgatccggggtgttgtcaaatgttagaagaaacatcattaaacaggcggaaatgagaatcattcagcgtgccgattccattacgtgtacatctgactgtctgcaccaggaggtcggaaaaaagctggagaacccgcaccagaaagtgttcaccattgaaaacggagtggaatatgacctgttttcacgggaaaataaacagccggatgaagacattttacggggacggaacggaacggttctcggttttatcggcggaatcaaaccgaagctcgattttgcgcttatggcggaaacggcagatttgaggcctgactggacgattttattggtaggcccgaacacggctcaggacgatccggatttcaagtcgcttctggagcgtccgaatgtcatctggacgggacctgccgcgccgaatgaagtgccgtcctatatgcagcttgtcgacatcggcatcatgccgtataaaaattcaccttataatgacgcggtatttccgcttaagctttttgaatttttagccgccgggaaaccggttgtcggctgcaatctttcttctacttcaaaaatcaaaaggcctttcgtttatgaatacgttgaaggcagtgatcccgcagatttcatcgcggcctgcgacgcgcttctggcagcggaccgcagcgggtcatatgaggctttgcgccgtgaattggcccggagacgggattggaatgttttattcggccgaatgctcgaatgcacaggtatattgaaaaatgcgcaatcccattaaaagggaaagcgcattttttgatttgcgtgtttctttttgatgatgcttgttataataactagtaagaattataatggaaggaacggttcaatatcagaaaagacttcatataattccaaaggagacttctttatgcttgacgaacgcatgtttcgcatagttgttgcgttttttgtctctctgctaacggttttaatcctaactcctatcgtaaaaaaaattgcgatcaaaataggtgcagttgaccagcccagcaaccgaaaagtacatgataaaataatgccccgtatgggcggcttggccatctttatcggcgtagcggcgggtgtgctcgcggccggcatatataatgaaacgaaaatgaccgccatcacggtgggtgcgtttattattgttattttaggaatccttgatgataaataccaattaagcgcaaaggtaaagtttttcgtccagctggccgtggccattatgattgtgagcacgggactgaaaatggactttttctccgtaccgtttttaacggaacgtttagaattgggatgggtcgcttacccgctgactgtgttatggatcgtcggtattacgaacgcgatgaacctgattgacggtttggacggactcgctgccggcctgtcggtcatcggactctccactatcgccgttatggcgttgtccggagggaaaatccttattctgtcactttcacttgtcgtgataggaagcacactcggatttttattttataattttcacccggcaaagatatttatgggagataccggatcgctctttctcggatacgtcatctcagtactctcattattaggtctttataaaagtgttactttattcagtatcatcattccgatcatcattttgggcgtgccgatttttgatacgacattcgccgtcatcaggcggattttaaacaaacagccgatctcagcgcctgataagtcacatatacaccaccggctgatggccttcgggctgtcacaccgcacggctgtcattatcatttatttaatcggcttcattttcagcgtcagtgccatcctgctgaaaagcgcgaccatatggctttcgctgtttattatttttgtattgattgtatttatgcaaatcatagcagaggtcacagggttagtaaatgaacaatttaaaccatttaccaagttttacaagagattggtaaagaaaaattaaaaagagcagatcatgcgaatggtctgcttttttgtggattctgctattctcttattatataaaaaaacccgatcctgctcaaaggatcgggtttactcttaatagcctgttgtgccgccggactgtgtgctgtccgtaccgtttgcaccagcagtaccgttggttgaatcggttgtaccgcctgttcccgtgctgccggaagtcgaatcagtcgtactgtccgttccggtgctgtcagaagcaggatcggacgccgtgctgcttctggacgggtaatccaggtgtttctgcaattcctgccgtactttttcgagattggtcggatccggctggaaataatatgttccgcctgtagacgcggttccgccgccgcctaaatatagatctgatcctgttatgctcagtgtatcaatctttttgctggtaaagccgctgtaaatctgctgaagggcaagtccttcagtgattcggatattcgtttggacgttattgcttgctgtttcagcgattttatcgattttagcaatatttccagctttagacatttggtcgatcagtgcatttaggatttgcttttggcggtcattccggccgaagtctccgcgcttatcctgctttctcatccgcgcgtaagccagagcctgctcaccgttcaaatgcatgtttcctttcttgaagtagatccgtttctttttactgacgtcactcatttcgtcgaagtcaaacggcacttttacattgactccgccgacttcatcaataacatccttaaagccgttaaaatcgacagtgacatacttatcaatcggtatgcctaataagtcttcgacggttgagacggtttcatccgccccgcccttagcaaaagccgcattgatttttgattttttaccggttgtatcgccggcaagcgtcacccgcgtatcacgcggaatactcagcattttcattgttttatttctcggatcaagggtaacgacaataagagagtctgatcgtccgccttttccgcttgtggcataattttcgatccccataaacaaaatggagaacggttttttcttcatatcgatgactttatcccgaagttttgatttgtctccgcgggaaagggcatcatatgcattatctgccgcattgatcgttttgtatactttgtatccgccaaacccggcagcgactaacaaaacgagggtaagcagcagcaaaatccgtttgaatatgatctttcgtttgcttttctttttctttcgaacacgcactcttacacgttcagccattacattagtctcctttagggctgacgtctgtttctaaatacgtcagttctccctctgtattcttactcttgccgttcgtcagttctgtcatccattttataaactcgtctttgtctttttcttcaacgtacgtttcaaattcgacatgatccgcataatggatatctttcagtaaaaaaactgattctctcagttcgttctctatcttgccgagccacgtataatccgctgatgtatgcataatccgcatcagcttccgctccgtaactcctatatgatttaagccttcagacactgacttcccatatgcacgaatcaatccgcctgcaccgagctttattccgccgaaataccgggtaaccaccgcgcaggtatctttcagaccgcgttttttcagcacttccagcatggggacgccggctgtgccgcttggttctccgtcatcattcgccttttgtatatggtcggtttcgccgatcagataagctgagcagttatgagtcgcattccagtgctgtttttttatcttttgtataaattcctgcgcttcctcttcagaagcagcacggctcaggtgacagataaagcgcgatttttcaatcacaatctcatgttcacccgtttctttaactgttaaatagctgtgcagcatgattgctggaccctcctgacaagcattaaaagacttgtttctacaaattcgaacagactttagaatttttgcgcatattttggtatcatgaaagagtaagatactatataaaaatgtttttttctagaatatacgcattctttcattataattcgacataaattgcagttcaattacatttataataaaaatacataacaacaccgttacggagggagacagatgaataaatcgaagatggactccaaagttttggattctatacttatgaaaatgctgaaaaccgtggacgggagcaaggacgaggtttttcaaatcggagagcagtcgcgccagcaatatgagcagctggttgaagaactcaaacagatcaaacagcaggtgtacgaagtcattgagctgggcgacaaacttgaagttcatacgcggcacgcacgaaaccgcttgtctgaagtaagcagaaatttccataagttcagcgaagaagaaattcgcaacgcctatgaaaaggcgcacaaacttcaagtggaactgacgatgatccagcagcgtgaaaagcagctgcgggagcgcagagatgatttagaacgccggcttttggggcttcaggaaattattgaacggtcagaatcattggtcagccaaataaccgtcgttctgaattacctgaatcaagaccttcgccaagtagggcttcttcttgccgatgcgcaggctaaacaagatttcggtttaagaatcattgaagcccaagaggaagaaagaaaaagagtttccagagaaattcatgacggtcccgcgcaaatgctggcaaatgtcatgatgagatcggaattaattgaacggatcttccgcgaccgcggcacggaggacggatttcaggaaatcagaaatctacggcagaatgtgcggaatgccctttacgaagtcagaaggattatatatgatttaagaccgatggcattggacgatctcgggctgattccgacactgagaaaatatctttatacaactgaagaatacaacggaaaggtgaaaatacattttcagtgcatcggagacacagagaaccaaaggcttgccccgcaatttgaagtggcgcttttccgtctcgctcaggaagccgtcacaaatgcactcaagcattcagaatcagaggaaattacagtaaaagtggaagtaaccgctgattttgtcgttctcatcattaaggacaatggaaaaggctttgatattaaggatgctaaacaaaagaaaaacaagtcattcggcttgctgggaatgaaagaaagagtagatctgcttgaaggaacgataacgatagactctaaaataggtcttgggacatttatcatgattaaggttccgttatctctcggcctataatttgttaaatagagccaaaagacatattgaccgaacagcggcgtatatagaacaataggataaggaggcgtagcgtgtgactaaagtaaatattgttattatcgacgaccatcaactattccgtgagggtgtaaaaagaatattggattttgaacctacctttgaagtggtagcagaaggtgacgatggagatgaggcggctcgaatcgtcgagcattatcatcccgatgttgtcataatggacattaatatgccgaatgtaaatggtgtagaggctactaaacagcttgttgagctgtaccctgaatctaaggtgattatcctctccatccatgatgatgaaaactatgtgactcatgctttaaaaacaggtgcaagaggctatctcctgaaagagatggacgcagatactttaatcgaagcagtgaaagtggtagccgagggcggttcttaccttcacccgaaagtaacccacaatcttgtcaacgaattccgccgtcttgcgacaagcggagtttctgctcatcctcagcatgaggtttacccggaaatccggagaccattacatatattaacgagacgggaatgtgaagtgctgcaaatgcttgcagacggaaaaagcaaccgcggaatcggtgaatcattgtttatcagtgagaaaacagtgaaaaatcacgtgagtaatattttgcagaaaatgaacgttaatgaccggacacaagccgttgtcgtggccattaaaaacggctgggtagagatgcgttagtcatgtgtgagaagacttgcctgttatggcaagtctttttttacagctgcatatctattaaaatacttattaagtacttaataaggcaggtaaagtgatgaagattgcagttgtaacagacagtacagcatatattccgaaagagatgagagaagaacatcatattcatatgatccctctccaagtggttttcggtgaaaaaacattccgcgaagaaacagaactcgactggagaagtttttataaagaagtaaaaaatcatgatgagctgccgactacgtctcagccttctttcggtgaattaatcgcattgtacgaagaactgagcaaaacatatgatgcagtcataagcatacatttgtccagcggaatcagcggaacatataacagcgccgcctcagcaaacactatggttgatcatattaaagtttatccctttgattcagagatcagctgtttggcacaaggtttttatgcattaaaggcagcacagctcattaaagacggtgttgactcaccggaagagattataaaagagctggaagaaatgaaaaaaacagtccgtgcgtattttatggtggacgatttatcacacctccagcggggcgggcgtctaagcagtgctcaggcttttatcggcggtctgttaaaggtaaagcctattcttcattttgacaataaggtaattgttccttttgagaagattcggacacgcaaaaaagcgatttcgagaatttttgagctgtttggggaagatgcaagtaaaggaatcccgatgcgggccgctatcatccatgcaaacagggaagaagaagcggcggatattatacaggagttaagcggtaagtatcctcatgtcgaattctataacagctatttcggtgccgtgatcggaacccatttgggcgaaggtgccatcggaatcggctggtgctttaaaaactaagtgaaaatctccgttttcaagggcggagatttttttattttttaattttggcaattcgacaagtgggttcccgacaaggcatactttgagcagaaaggaggcagggagatgtccgaaggtgcttcagaattttcagaggtgcgggatttcttttacggccggcatttattgagatctgagataccgttttcagatcagcgcatcaacggttttatagaaaaagagtatataacggccgagccgtcaatcatccgccggaaaaaccgttacgtctgccaacgatgcggtcagtctgatcaagcctgctttgcggcattttgggcgtcctttgccaaaaggcagattacctattgccgtgcctgtgtcatgatgggaagggctgatgaactgacatcattatattcttggaatcaagcctctgaaaacagctgggagcctgtaaagctttcttgggaaggaacactgacagacggacagaagcaggcggccgccgcgcttacagatgcgataaaagagagacaagagctgttagtatgggcggtttgcggatcggggaaaacagagatgctgtttccgggtatcgagtttgcgctgaatcacggtttgcgcgtctgtgtcgcgactccgcgtacagatgtcgtacttgaactgctgccgagactgaaaaaagcatttgagaaagtcgaagtttctgctctgtacggcggcagcgaggacaaaggccgtctgactccgctgatgatttcaaccgctcaccagctgatgcgctaccgagacatttttgatgtcgtgataatagatgaagtagatgcgtttcctttttccgccgatgagacattaagattcgctgttgataaagcgaggaagaaaaacagcgcccttgtttatgtaacggcaactccttcagacacattaaaaaagaaggctgaagccggtttgctgaaaagcgtccgcataccggccagatatcatcggaaacccctcccggagccgcgttttttgtggtgcggcaattggaagaagaagcttcagaaaggaaaactgccgcgctctgtaactgattgggtttgccaaaaacttcaattacagctgccggttttcttattcgttccgtctgtacacgtattgaaaaagacaacggattattttcagaaattaaacatacgggcagaaggcgtacatgcggaagacacattcagaaaggataaagtgaaacggttcagagacggccggcttgacctgctggtaacgactacgattttagaaagaggggttaccgtgcccaaagttcagacatgtgtcctcggcgcagaagcacctatctttactgagagcgcgctcgtacagatcgcaggcagaacgggaaggcattataaacatttcagcggtgatgtcatcatgtttcatttcggaattacaaacggaatgaaaaaagcaaaaaaacatattgaacatatgaacaaattggcacaaaaaagtaaattgttggactagttaatttcagaaaacgtgatacagtatactcatactttcctatgaggagctgtcagcatgcttgtcaattctaaagaaatcatattaaaggaacttctcgaccgccatatgcctaagcttcatatgaaatgcacatgccgggtatgcaaaaatgatgtactggcactttcactaaaccgggctgaaccggcatatgttacagataaaaagaaagttgcttatgcaaaagcagagatagttgataaacagaaaaatacggcgctgcttgtcattctggctgaatcagcggcgattgtttcggttaatccaagcgagttctgtgaaactcgggaaggagcgtaatatctctgaattgtttattgtgtgactcaccaatttcaagttcattgacttggagatctctgttttctctggcgcccgagcaagaggtatgcagcatatgcagcagccaattcgaaaaaattgaaggccccgtatgcagtatatgcgggaggcctcaggagtcaaatgaaaaatgcgctgattgtgcggcccgggaatcaaaaacggaaaagcgctttttgctgcggcaaaaccgttcggtatatttgtataatgatgcgatgaaggactcattggcccggtttaaattcaggggtgatgcgaaaatcattcaagcatttgaacgtgactttgctgccggctttaaagcggcatatccatcaaatacacatactctcatccctattccgctgagcggcgaacggctggccgaacgcggattcaatcaatccgagctgctggcctctctgctcggaatgcccgtcattttccccctcatccgactgaacaacgaaaaacaatccaaaaagagcaaaacagacaggctgtctgcagaaaaaaagttttcagcagccgaaaactccgccaaaggtatgaacgtcatcttaatagatgatatttatacgacgggcgccacacttcaccaagccgccgaagtcctgctgacagcgggcaaagcgtcatcggtctcctcttttactttaatcaggagctaaatcattctttttttctgccgatataattgatagaaatataaggcagattaaagaaggaataggagttaatacgatgggtgaattggcgaattgtccaaaatgcaatgctttattttttaaaacgaacctgcagaccgtgtgccaggcatgtattaaagaagaagaaaaagcatttgaaaccgtctataaatttttgagaaagcagatcaacagacagtcgacgatgcagcagatcactgaggaaacaggtgtggatgaagagctgatcctcaagtttatcaaacaaaaaaggattcagatcagccagcttccaaatttggcatatccttgcgaaaggtgcggaaatccaatcaggacggggaaattttgcaagtcctgtcagacagatattgagtcgcaattagaccatatgaaccaaaaaacagccgctgaattcgaagagaaaaacagtacaaaagacacatactatgcctataataccaaaaacacctgattccctaaactaactgataacgcagtcgataaaagaattagactgcgaacagaaagcgagaggaatcctatgaaaatcaatcagtacggaacacaatccgttaatccataccaaaaaaattacgaaaagcaagccgtacaaaaagaggctgcaaagccgaaggacaaagtggaaatttcttctcatgcaaaagagcttcaaaatgcgtcagatgcggtcactaaaacacgtcaggaaaaaatcgctcagcttaaagcggatatagagagcggaacatataaaatagattcaaacagcatcgctgaaaacatagtgaatttctataaaaagcaataaaaaggagaaagtcaatgtcagcaaagccaattattgatcaactgaagcgactttgcgctctgcatgaacatctgctcacgctgtctgaagagaaaacggaagcgctgaaagcaggcaaaacaaaagagctctccaacattttgaccaaagagcaaaagtatattcaggcaatcgggcagactgaggaagagcgcatcaggttaacttctcagtttctcagccgcagtgaggacaatacaattgctgcatgcatctccagaacttcaggcagtgaaaaacaggagcttgaagggttatttcactctttgtctgcgcttcttgaccgtctgaaagaagtgaatgagatgaacaaacagctcacgattcaggctttacaattcatctccggggcattcgatatgatcatgccgggtgaaaaagagaatatgaattataaagagccgcaagcggcacgcaagcctgtcagccgtttgacattattcgattcaaaagcttagaacggaggatttttaatgccatcgacttttatggggctcgaaacagcaaggcgtgcattgagtgcgcagcagactgcattgagcacagtttcaaataacgttgcaaatgcaaatacagaaggatatacgaggcagcgcgttacattacaatcgacgagcccttatcccgcagtatcaaaaaacagtgatctgacggccgggcaaatcggaacaggagtaaaagccggttcagttgagcgcgtcagagacagttttttagactatcagtacagaactgaaaatacaaaattagggtactatacagcccgttccaattcattgtcacaaatggaaggcgtcatgaaagagcttgacgataatggattaaacggatcgctcagttcgttttggaatgcccttcaggatctggcgacgaatccggaaaatacgggagcgcgctcagttttgcaggagcaggggaaatctcttgccgaaagttttaactatatatctacctctttgactaacattcagggtgatattaaaaagaacctggataacacagcggatcaggtcaattccattctcaatcagctgaatgacattaacaatcaaatagcggcagttgagccgagcggtatgctccctaatgatttgtatgaccaaagagacagattgattgatcaattatcttctatggcaaatattaaagtttcatataataagtcgggcggacatgccttggcgactgctgagggcacggttaacgtcgaattgctgaacggaaacaacaattctctcggtacgctgctcgacggtaacacaaaaacagtttcagaaatgaaaataaactacgacaaggacagcggtctcgtgtcgagtgtgtcagtcggcagcagtacggtcaatgcggatgcatttaccggtaaaggctcacttttaggtcttattgaatcatacggctatatgtcaaacggagaagaaaaaggtctttatcctgaaatgctgacggctcttgacaatatggcgctgtcctttgctgacgcgtttaatgcagttcatgaaaaaggaaaaacctatacaggcgaacagggcgcagcattttttgatttcagcggtggtgaagcggtgcctgcaaaaggtgcggcagcgaaaataaaagtcagtgacaaaattcttgcgtctactgataatatcgcagcgtcgttaaacggagaaaaaagtgacggcacaaacgcgacaaatcttgcagccgtacagaacagcaagctgactattaacggtgaaaccactacaattaatgacttttatgaatcccttatcggaaagctgggcgttaattcacaaaaagcggccaatcttatgaacaactctgaaagcaacaccctttcagccgatgaacggagacaatcaatcagtgcagtgtctttagatgaagaaatgacaaatatgattcagtttcagcacgcttataatgcggctgcgcggattataacgatgcaagatgaaatattcgataaaattattaacggtatgggcaccggaggaagataggagataaataaatgagagtaactcaagggatgatcgcaaaaaattctcttcgatttatcggctcaagttatgacaagctcgatcggcttcagcagcaagtatctacggggaaaaaaatcacgaaagcttctgatgatccggtcgttgcaatgaagggaatgcagtaccgtactcagcttgcgcaggtaaaccagtatcagcggaatgtttcgcaaggctttacatggctggaaaactcggaatcaagcgtaaactcggaaacggatattatggggaaaatccgggacttgatggttcaggcgaaaagtgattcgaacggtgaaacagaattgaaagcaatcggtacagaaatcggccagctgaaaaagcagctcgtttctgtcgcgaatactcaggtaaacggacgttatctgtttaacggaacaaattcagatgtcccgccgatcactgaaaatgccgacggcacatatacgtacaactatgagaattataccggtgcttcggatgttaacattaacatctcgaacggagcagtgctgaaagtgaattctgatccaaactcagctttcggaggcgtcgcacaaaatggagataatgtatttgaatttctaaactccctagaagcttctttaagcaaaggcacgctgtccgaagcagattcaaatcaaattctgtcagatatcgacggttttactgacaaaatgaatgctgaaaaatccaatatcggcgcacgcacaaaccggttggaactcattcagacaagattggaatcacaagcggcaaccgctgaaaaagtattgtccgataatgaagatgtagaaatggaagatgtgattgttgattatttatctcagcagacggtccatagagcagcgctgtcagtgaatgcgaatatcattcagccgtcactgattgacttcctgaaataatagaactgaccgtcttcaatatataaaaaagcgactcacaccagggagatcgctttttttactaaaatactataaacaggagggatctctgtgcagatgccgagattgattattgacagtgtgcctgctaaaatcggtataacctttcaaaaggaagaaatcgagatggaacagccgcccgctgacttggaaatcgagcagccgccggcagagctgaacatagaaagcacgccggccaaactgacgattgaccagacgagggcgtgggagaacttgaatctcaaatcatttgaaaagctgaacgctgaagccgctcagaaaggtgcggaagcctgcagcgagtttattgcaaaaacagtcagggaagggaaggaaatggcggctatcgaaaagaaaacgggcaatgtgatggcccggcaggcagcggatgtcagaccgcccgatccattcggcgaattcagcgactttctgcctgcgcagtttctcgtcgacattgactgcattccttcaaagcttacgattgatattgaagcccgcaaaccttcaattgaagcagccgtcaataaacctgtatggaattatacgccggggaaagttcagattgatatgatgcaagaccctaaggtgacgatttcggttgacgatggcaacgcagaataaaagatgaaagtggtaaaggattgtgaagcatgataattaaaacaaaatatcacggagaaatcagaatagacgaagggcagattatctcatttgaaaacggcctgccgggatttaatgacgagactcaatttgttgttcttcctttgtcggaagattcaccgtttttggcgctgcagtctgtcaaacaggagcatatcgcctttattgtcgccagtccgtttattttctttaaagggtacgaatttgacattgaccatgcgacgcttgaacttttgcatattgaagatatagaggacgtcgaagtgatggcgattttaacgctggaagagccttttgaaaacacgaccgccaatttaaaagcgccgattatcgtcaataaaaaggaaatgaaggcgaaacaaatcattttacatgatgcttcctatgaaacaaaacatctgataggaggaggatcatgctagttctctcaagaaaagtgaatgagtccattcagatcgggccggatattgaaataaaggtgatcgccatcgaaggagaacaagtgaagctgggaattgaagcgcctcagcacgtagatattcacaggaaagaaatctacttgtcgatcctggaagagaacaacagagctgtatcttttaatactgatttattacttaacttatcctcacaaaaaaagtgaggatttttttattttcaatataaacaatggaagcggccgtccgatatatatattgtagccaatgagaggaaaaattttcttcagaatgacgctgcgtaaatgcacaaggacgtgcgaaaaacaattcagggaggaaatacaaaatgagaatcaaccacaatatcgcggctcttaacactagccgtcagctgaatgcaggttcaaactctgctgcaaaaaacatggaaaaattatcttcaggtcttcgcatcaaccgcgctggtgatgacgctgcgggtcttgcgatctctgaaaaaatgcgttcccaaatccgcggtttagacatggcttctaaaaatgctcaagacggaatctctcttatccaaacatctgagggtgcattgaacgaaactcacagcattcttcagcgtatgagcgagcttgctacacaagcggcgaacgatacaaacactgattctgaccgttctgagcttcaaaaagagatggaccaattagcgtctgaagtaacaagaatctctactgacactgagttcaatacgaagaaacttcttgacggaactgcgcaaaaccttacgttccaaatcggagctaacgaaggccaaacaatgagcctgtctatcaataaaatggactctgaaagcctgaaagttggtacgacttatactgtatctggtgatcaaaatacacttacagcaactgatggaagcactgctacttgggctgacgaagaaaaagacggaactactggtgaagtcacaaaagctgctggatattatgatgataaaggtaaagttgttgcatctgaaaaattagctgcagattctaaagtaacaaaaggtatcgacatctcatcttcagctaaagctgcgtcttcagctcttacaacaatcaaaacagctatcgacacagtatctagcgagcgcgctaaacttggtgcagttcaaaaccgtttagagcacacaatcaacaaccttggtacttcttctgagaacctgacttctgctgaatcacgtatccgtgacgtagacatggcttctgagatgatggagtacacgaaaaacaacatccttactcaggcttctcaagctatgcttgcgcaagctaaccaacagcctcagcaagttcttcaattgctgaaaggttaatgacggaaagatcctggttctccagggtcttttttttatttcttcagctatctcccccttcagcaagccaaagaaccctattgacaaaatgaaacattatattttgcagttaaattattgaaaaccttttaatatgaccgatataagaataagatcatacatttatggagctgtgatatgataaacagtcggaaactcactgttgtcatagagccgtctacgactaaacgccgaaaaggagagggtacatatggtcacaagaatcacaggccttaattccggtcttgatgtagattctctggtgaaaaaaatgatggatgccgaaaagcagccgcttaataaattaaaccagcaaaagcagacgcttgaatggaagcgcgatgcttatcgggaagtgaatactcagattgccgacatgtattctacgacatttaataatatgctgatgtccacaaactggaataaaaaaacagtaacaagttcggattccagtgtcagcgcggcggccgtcagtgctgagcagaatatttcaacgagtatgtctgtacagcagctggctacgccgacgacttataaatcatcaggcgccatcaatttcacttcgggtcagagccaaacattgaaattcaatgtcacaaatccgggtgaaacgaagccgactgaggtaaacgtcacgattgccgcaaccgatacgattgacgatgtcatttccaaactgaacagctcgggtctcggagtgacggctttaaaagagaaaatttccaacggcacggattatgtggatacgattgcgttcacttccaataaaacgggggaaggatttacccttgccgcaggtgatgacgcaaccaaaagctttctgaaagatcagctcggttttgccgttgatgatgcaacaaatgaactgacggccaatgccgaagggaaaaacgcgaagtttacgttcaacgggcttgaaatgacaaaaacgtcaaataactttacgatcaacggcatcaaatacacgctgaacagcgtgacggacagcaataaaacggttacgattaacagcacgactgatacggacggcatttttgacaacattaaagatttcgttgataaatacaatacgttaattaaaagtgcaaacgagaaggtaacagaatcaaaataccgcgattataagccgctaactgatgaacaaagagaagcgatgaccgataagcagattgagcagtgggaggcaaaggctaaaagcgggttattacggagcgacagcacgctgcataacggtttggctgagatgcggcttgatctgtactcaacggttacgattgacgggaaaaaatatcagcttgccgatttcggaattgagacgtctgatagttatacggatcaaggaaagcttgtcattaaagacgaagcgaaactgaaacagaaaattaccgagaatcctgctctcgtggctaaactgtttaatgcagacagtcctgatacagcgaaaaccaaaaacccggaggaacaggggattgcccggagattaaaagacacattaaacaaaatgcagacccaaatttcaaaacaggcgggtacggaaagctcggtatcaaccagctttgccatcggaaaaagcctgaatgaaatagagacgaatatttccaatatgaaaacgaagctggatgacatcgaaacgagatattataaaaagttcagcgcactggatacggcattggagaaattgaacagccaatcttcatatctcacgtcaatgttaggatcttcaacatcataaccttggaggttttataaaaatggcaataaataatccttttgctgcttatcagcagacatccgtctttacagccgctccggaagagctgacccttatgctttataacggctgcctgcgattcattaagctggcaaggcaggcgatgaagcaaaacaaccttgaagccaaaaatgaaaatatcgtaaaggcgcaaaacatcattcaagagctcagcatcacgttaaaccgggagattgagatttccgagcagatgtcatccatttatgattacatccgccgccggctgatcgatgcgaacgtgcagaataacggagagtttttagatgaagcggaaaagctcgttactgaatttcgcgacacgtggaagcaggccatgcagagtgaacggaaaaacagccatggcgcgggcggccttgcctgatgaacagcaatgtcttttctttgtataacgaaacgaagaacatgtacgccgcactgaaggacgccccggaaagcgacggtcttatcagcagcgttacggcatttacggagaaaagggaggagatgcttgcgggcataaagccgcctttttccgaagaagaaaaaacgctgcttcagcaggtggccgcgatggaccgcctgattacaggcgaagtaaaacggattcaggatggtatccgaaatgaaataaaaacgcttaagaaaaaacgaatctaccataatacgtatttcaatccgtatcatcaaacgacaagtgacggccgttattacgacaaacgcaaataggtgagtgttttgagaagtttgaacgattaccatttggtgtcagcctattaccagcttctttttacgattgatgaggggctttgctacctgttggacacgcaggatgatttttttaagacggagggcgagcggatttacaacgatttgattcaggctttttttcatctcgattcctctcatgcgcttctgctgtctatcattgagtgccgatgcgtggagacggcgatccgctcatttgacgagatctttcaggatttcagcatgttaaatgattatgatttcccgtccgccccttttcaggagtttttaaaaaccatctttctgccgcattataagctatggatggagcagacgcacgactgcatcaaaccgtatgttcttcactagacctgctgcaagcggcaggtcttttgcctgcgtcttccgcatatacttataatcctgccggaagctgcgggataaaaccgacaccattcgtcatcgttcaccgaatttacacattattttaacgtttcagcagggatcagaaggggtaaaagagaaatagttacatatccttagataaagggaggcgttctttgatgaactacaatatcagaggagaaaacattgaggttacacctgcgttaaaggatcatgtggagagaaaaatcggcaagctggaacgatatttcgagcagagcgtcaatgccgatgtgaacgtcaacttaaaattctataatgataaggaatctaaagttgaagtcaccattccgatgactgatctggcgcttcgttctgaagtgcataacgaggatatgtacaatgcaattgatctcgcaacaaacaagctggaacgtcaaatccgaaagcacaaaacaaaagtcaaccgaaaattccgcgaccagggtcttccgaaacattatttcgagaacggcagcgctggtgatacgggcgtagcggttcaggacgaaattgaagatgacagcccggaaattgtccgtcaaaagcgttttaatttaaaaccgatggataatgaagaagcgattctccaaatgaatatgctcggccataatttcttcgtattcaccaacgcggagacgaatctcacaaacgtcgtttaccgcagaaatgacggcaaatacggattaattgaaccgactgaataaacccatccagccttccgtgaacgtgcggaaggtttttctctatctttacctgcaaattctttggaaatggcaaaaggtatgttatgataatgagaggtatacatggacagaaaattatcatttattccatgcaaaatctgcatgtgaacatagaggagcgttatagatgcttgggattttaaataaaatgtttgatccgaccaaacgtgcgctgaacaaatacgaaaaaatagcaaatgacattgatgccgtaagaggagattatgaaaatctctctgacgaggcgcttaaacataaaacggcagaatttaaagagcggcttgaaaaaggagaaacgacggatgaccttcttgtcgaagcgtttgccgtcgttcgtgaagcttcccgccgcgtaaccggcatgttcccgtttaaagtgcagctgatggggggcatcgcccttcatgaggggaacatctccgaaatgaaaacaggggaagggaaaacgctgacgtccacgcttcccgtgtatttaaatgcgttgacaggaaaaggcgttcacgtcgtaacggtcaacgaatatctggcgagccgtgatgcccagcaaatgggagaaatctttgcgtttctcgggcttacagtcggccttaacctgaattcgatgtcaaaagacgaaaaacgcgaagcttacgcagccgatatcacgtattcaacgaacaatgaactcggctttgattatttgcgtgacaacatggtgctctataaagaacagatggtgcagcgcccgcttcattttgccgttattgatgaagtcgattcaattttagtcgatgaagcgagaacgccattgattatttccggacaagctcagaagtccacaaaactgtacgtgcaggcaaatgcgtttgtccgcacactcaagaaagatcaggattatacgtatgacgtcaaaacgaaaggcgttcagctgacggaagaaggaatgacgaaggctgaaaaaacgttcggcatcgacaacctgtttgatgtcaaaaacgtggccttgaaccaccatatcaaccaggctttaaaagcccatgcggcgatgcagaaagacgtggattatgttgttgaggacggccaggtcgtcattgttgattccttcaccggccgtctgatgaaaggacgccgctacagcgaaggtcttcaccaggcgattgaggcgaaagaaggcctggagattcaaaatgaaagcatgacattggcgacgattacgttccaaaactatttccgtatgtacgaaaagctggccggtatgaccggtaccgcaaaaacggaagaggaagaattccgaaatatttataacatgcaggttgtatccattccgaccaaccagccggtcatccgtgacgaccgtccggacttgatctaccgctcaatggaagggaaattcaaggcggtggcggaggatgtcgcccagcgctacatgaccggacagccggttcttgtcggtacggttgccgttgaaacgtctgaattgatttctaaacttctgaaaaacaaagggattccgcatcaggtgctgaatgccaaaaaccatgaacgtgaagctcagattattgaagaagcgggacaaaaaggcgctgtcacgattgcgaccaacatggcgggacgcggaaccgacattaaactcggcgaaggcgtaaaagagcttggcggccttgcagtcgtcggtacggaacgccacgaatcccgccggattgacaatcagctccgcggacgttcaggacgtcagggagacccgggcatcacacaattttatctttcaatggaagatgaattgatgcgccgtttcggagctgaacggacgatggcgatgcttgaccggttcggtatggatgactccacgccgatccagagcaaaatggtgtcacgcgccgtggaatcatctcaaaaacgtgtcgaaggaaacaactttgattcacgtaaacagcttcttcaatatgacgacgtgctccgtcagcagcgcgaagtcatttacaagcagcgttttgaagtcattgactctgacaacctgcgtgacattgttgaaggcatgatcaagtcttctctggaacgtgcgattgccgcttatacgccgaaagaggagcttccggaagaatggaatcttgacggcctcgtggagctggtgaatacaacgtatcttgatgaaggcgctcttgaaaagagcgatatcttcggaaaagaaccggatgagatgcatgagatgatcatggaccgcatcatgacgaaatataatgacaaagaagagaatttcggcgaagagcagatgcgtgaatttgaaaaagtcatcgtattgcgtgccgttgattcaaaatggatggatcatattgatgcgatggatcagctgcgtcaagggattcacctccgcgcttatgcgcagacaaatccgctgcgtgaatatcagatggaaggtttcgcaatgtttgagcacatgattgagtccattgaggacgaagttgcgaaattcgtcatgaaggccgagattgaaagcaatctggaacgcgaagaagtggttcagggccaaacgacggctcatcagccgcaggacggcgatgaggccaaacaagcgaaaaaagcgccggtgcgaaaagtcgtagatatcggacgcaacgcgccttgccattgcggcagcggaaaaaaatataaaaattgctgcggccggacagaatagtctcgactgtatgaagcgaacatgaccgggtctgcgtcttatggcgccccggatcttttaatgaggtgaatggaatggaattatcagaaatcagggcagagctcgaaaatatggcttctcgtttagcggacttcagggggtctctttgacctcgaatcaaaggaagcccgcattgcagaattagatgaaaagatggcggaaccggaattctggaatgaccagcagaaggcccaaaccgtcattaacgaagcgaacggtctgaaagaatacgtgaactcctatcatcagctgagcgagtctcacgaagagctgcaaatgacacatgatcttttaaaagaagaacctgaccaggaccttcagcaagagcttgaaaaagagctgaagtcattaacgaaggaattgaatgaatttgagcttcagctgctgctcagtgaaccatatgacaaaaataatgcgattttagaacttcacccgggcgccggcggtacggaatctcaggattggggttccatgctgctcagaatgtatacccgctgggcggaaagacgcggtttcaaagttgaaacgcttgattatctcccgggagatgaagcaggaattaagtctgtcacactgcttattaaaggccacaatgcatacggctatttaaaagcggaaaaaggcgtacaccgcctcgtgcggatttctccatttgattcatcaggccgccgccacacgtcattcgtgtcatgtgaagtcatgcctgaattcaatgaagaaatcgacattgatattcgtaccgaagatattaaagttgatacgtaccgggcgagcggtgccggcggacagcacgtcaatacgactgattcagccgttcggatcacccacctgccgacaaatgtagtcgtcacgtgccagacggaacgttcacaaatcaaaaaccgcgaccgggcgatgaaaatgctcaaagcgaagctgtatcagcgcagaattgaagaacagcaggcggagcttgacgaaatccgcggcgaacagaaagaaatcggctggggcagccaaattcgctcgtacgtcttccatccgtactccatggtgaaagatcaccgtaccaataccgaaatggggaacgtgcaggcggttatggacggagatatcgatatcttcattgacgcctatttacgttctaaactgtcgtaatccgggaacacacctgcctttggcaaggtgtgtttttttatccgttctctttctccatttttcacaacagcgctttagcaaattaatacggtatttggctgttatttacttctaagccgggaagacttaaaatgctatcgagagaaaatcggagaacggaggattttgcatggatgtgaatcacaataagccgctccgtctgatcaaagattatatatacatcatgatcggcgcggcgattacgggggtcgtgtttaacgtatttttgctgccgaaccgtatagcagcggggggagtaagcgggatcagcaccattttagaaacgtttggttttgaaccggcttacgtgcagtggattattaacatccctttgtttatcgccggagtgatcattctcggcgggaagttcggaatgaagacactggtcggttccatcgttctgccgctcgcagtctatttaacaagagatctgcctgccgcgacgacccatgaactgctggcggcgattttcggaggcgtcgggatcggaacgggaatcggcatcgtgtatctcggcaaaggctccacggggggaacggctctggcggggcagatcattcacaaatacacggggctgtcgctgggaacgtgccttgccatcatggacggattaattgtgctgagcgcgatgctcgtattcggagtggagcagggattgtatgcgatgctcggggtatttatttcaagcaaaacgattgatgtcgtgcaggtcgggttcaaccgctccaaaatggctttaatcattacgcagcatgaagaagccgtcaggtcggctgtgtttaaagaaatcgacaggggtgtgacgaagatttccgcagtcggcgggtatacggaacatgaccggccgatcttaatgtgtgtcgtcggccagactgaattcacaaaactgaaacaaatcgtcaaacagattgatgagtcagcctttgtcattgtcgcagacgcaagcgaggtgctcggcgagggtttcaaacgcgcgtaaacggggttataatagcgaaggggtgcatcttacatatgaaatcaaaatgggcgctgctggcgctggttctgaccatgtccgtcctgctggcggcatgcggcggatccaatgaatcgaaaaaagaaagctctgacagctcaggcggatcaaaagcatctgcgtcagcaggagaagagctttatcagcaaagctgtatcggctgccacggaaaagacttagaaggcggcggaggtccgaatttacaggaagtcggcgggaagtatgatgaagctaaaattgaaagcatcattaaaaacggacgcggcaatatgccgagccatcttgtaaatgataaggaagccgctgagatcgcaaaatggctgtcacagaaaaaataacagaaaaaccttgcctgttataggggcaaggttttttcacggtctgggaatgaaaagaaactgtaatagtaatatgtctaaatttgacgtataatgaagtgtactgaggaaaaggaactttcagatttttcatctgtttcctggtaaatcggccataaaccgctgtacgtttgcgaactctatggctgcaagacataattaaaagattaggtgatttcatgatagagatgaaagaagtatataaatcctatccgaacggtgtaaaagcgattaacgggctgtcagtcatgattcatcccggagaatttgtatatgtcgtgggaccgagcggagccggtaaatctacttttattaaaatgatttacagagaagaaaagccgacaaaagggcaaatattgattaatcataaagatctcgcgtctgtgaaagaaaaagagattcctttcgtgcggcgtaaaataggcgttgttttccaagatttcaaacttcttccgaaattgacggtatttgaaaacgtcgcgtttgcacttgaggttatcggagagcagcagtcagtcattaaaaaacgcgtgctcgaagtgctcgatcttgtgcagctgaagcataaagcgcggcagtttcccgaccagctttccggaggagaacagcagcgtgtttccatcgcaagatccatcgtcaacaatcctgacgtcgtgatagctgacgaaccgacgggcaaccttgatccggtcacatcatgggaagtcatgaagacactggaagagattaataaccgcggaacgaccgttgtgatggcgacacacaataaagaaatagtaaacaccatgaagaaacgggtcatcgcgatcgaagacggaattattgtgcgtgatgagtcaagaggggagtatggttcttatgattaaaattctcgggcgccatttgcgtgagagttttaaatctctcggaagaaacacatggatgacatttgcatccatcagtgccgttaccgttacattaattttggtcggcgtgtttttagtcattatgctgaatttaaacaacatggctaaaaatgctgaaaaagaagtggaaattaaagtattaatcgatctgacgtcgaataagaaaacgcaggatacgctgcagaatgagattaaagacatctcgggaatccaaagcgtagagttttcatctaaagataaagagcttgatcaattggtcaaaagcttcggcgacagcggaaaggccatgaaaatgcaagatcaggaaaacccgctgaacaacgcgtttatcgtcaaaacgacagatccgcatgatacgccgaaagttgcgaaaaaaattgagaagctggatcatgtgtataaagtgacatacgggaaagaagaagtcagccgtctgtttaagatcgtcggggtgtcacgcaacatcgggatcgcgttaatcatcggccttctgttcacggcgatgttcttaatttcaaatacgattaaaatcacgattttcgccagaagaaaagagattgaaatcatgaagcttgtcggcgcgacaaactggtttatccgctggccgttcttcctggaagggctgctgctgggggtattcggttctatcataccgatcgctctcgtgctgagtacgtaccagtcgatggtcgcttgggtggccccgaaagttcagggatcatttgtttcacttctgccgtacagtccgtttgtgtttcaagtatcacttgtgctcattctgatcggcgcggttatcggagtatggggaagtctgacttccatccggaaattccttcgtgtataaatacaaaagccagtctgatatagactggctttttttaatggtttcgttactgaatgacgggcagggccggtgatccgggctttaatgtaaagtcataagacgcttcgtcacggtacatcgggtccgcataaatggaatccgaatcgtttgccgttcctttttggtacgctgtgaatgaatcatattctctgttcttccaattccaaatgctgtcttttcctgcttctttgtgatagacgttatgattaacggtattgccttcgtttttcgtataatcatttgcgataaaaatccgtgaaccgctagccgtcatgatgtttttttcgatcgtgttcccttttgtgccgtactgcagcagcagctggccgccgtcaaggtccttcgtgtcatttcggtacatgatgttgtgagcgatcactgaattgatggttccgccgcgtttcgtgtcatagcctccgattgaaataccggtgtaagcattgccgtacaccttgttatccgtaatccggatatcttgtgcgtatttccctttatgttcggaagtggcttcaatcccgaggtcattgttgtaaacggtgttattcttaatgtccacatgttctgcgccgtcaacgtaaataccgcccgctgaatattcatctccgtaagcgggatttccgtaagaagagttatggctcaccgtattgttttcaatgacgccgtttcgcgcatagtcgttttgcttggacgttccttcgtatccgatcacgtcaatcccgatattgttattgtcccggatggtattgccggcaatcttaaatccgtcaacattcccgttcagcacgaccgcttcgcttgcgccgagcgtcaatttttcaaccgtattatttgtgatgctgacatccttcatggcgcctgtgccgtaaaacgcgatgccgtgtgcatttccctcatcagccgtggttttaatgtttcggatatggttgccgtcaatgttgatatgactgctcgacccggtgacgcagatccccatggccgtcgcatcttctgatgatacggagagattctcaagcgtaacgccgtgaatggtaatgtactgtttattgcggatttgaattaacggagtttcagaatcgctttttggcgcagatttgccgctgattgagacatgctcattctgatagttccgaaatgtaatcggcttttcggccgtgccgctgtgctttacttcaaacgtttcatcgtacgtcccttcccgaatcaatacggttgtcccggcctctgccttttcagccgcatgttttaatgtgcggaacggcttttctttcgttccttcattttggtcgctgcctgcgggagaaacatacagggcgtccgtctgcgttttttcattggcctctgtttttggccagacaaaggcggtaatgcctgcggccagaaccgccgcggataaaatcgataattttattttcatatcgcattctcctgtatatttaatgaattgcatacaaaatattatacgttacccatatatatgtaacaatctcgcgttttcatttttttgttgccgttacatgaattctttgcaatttacacatactatctccaggttttcgtaaaaggactaagaggaggtaaacgatgaagcagaaaatgatcgcagtgatagcggccgtcagcatcatgtgcggcggagctcatattgccggggcggcacagccgaattcaacagacgcagaaagaagccgggcaatggaaaaaatcgaaaaagcatatgagctgatctcgaacgaatacgtggaaaatgtagataaagaaaagcttcttgaaggagcgattcaggggatgctgtctacattaaacgacccttattccgtttatatggacaagcagaccgctaagcagttttccgattctcttgattcttctttcgaagggatcggcgctgaagtcggtatggaggacaataaaatcattatcgtatcaccgtttaagcaatctccggcggaaaaagcgggactcaagccgaatgatgaaatcatcagcataaacggcgagtcaatgaacgggaaaggtttaaacgaagccgtgctgaaaatcagaggaaaaaaaggatcgaaggtttctattaaaatacagcgtccgggtactgaaaaacagctgtcattccggattaaaagagcggaaatcccgcttgaaaccgtatttgcttcccgcaaagaatcaggcggtcatcatgtcggctacatcggaatatcgacattttccgagcataccgcccaggacttcgccgcggcgctgaaaaagcttgaaaaacaagggattgacggtctcgtccttgatgtaagagggaatcccggcggctaccttcaaagcgtcgaacaaattttaaagcatttcatcacaaaagacatgccgtatatccaaattgcggagcgtaacggcgataaaaaacaatatttctcaaccttaaaacataagaagccgtatcccgtcaatgtcatcacggataaaggaagcgcctccgcttcagaaattcttgcgggtgcgttaaaagaagcgggacattatgacgttgtcggtgacacttctttcggtaaaggaacggttcagcaggccgtgcctatgggagacgggagcaacattaaattgacgctttacaaatggctgacaccgaaaggcaattggattcacaaaaaaggcattgctccgacaatcgctgtgagccagccggattattttgcggcgggaccgcttcagctgaaacagccgcttcagcctgatatgaacagcgcggatgtcaagcacgctcaaatcctgctgaaaggcctaggcttcgatccgggcagagcagacggctatttcagcaaaacaatgaaaaaagccgttctggcgtttcaagaccggtacaagcttgataaaacagcggtcattgataaaaagacagcggaaaaaatgaatcagctgatgaatgaacagaaatctgacgaaaaaaatgatttacagctgcaaatggcgttaaaatcattatttgtaaaataaatgaaaaggaggcgttttttacgtctcctgtttcttttgtcacactctaaaaatgaactaaaagacatataattatgtcggttttgacaagatattaaaaaaattttcacatttaaacatttataaaggacaaacattacccgatatttatagagaagagagactttatgccgagttaatatgtattcaaaatgaaacttttgaaagttgcctcagtcagttttagttcttacaataaaagaaggttctaatagagaacagttttagtttggcagctgcatttcagtatcgaaagcagaagtgtttgcggcgcttcagcacggcagctgtaatcacccgtgcttatctggataaaaaaatgggggttcacaattgaagagggcaagtattgtgcgtgaaaagaaatattatgaattagtggaacaactaaaagacagaacaaaagacgtcacattttcatcaacaaaagcactaagtcttcttatgctgttcagcagatacctggtcaattacacaaatgttgaatgcgttcacgaaattaatgaagagtgtgcaaagcattatttcacttacttaatgaaaaaccataagcgtttaggaatcaatctgacggatattaaacggtccatgcttttgatcagcggtgtaatcgaggtggaagtcgaccactatctgaaagatttctctctatcaaatgtgacgttgtggatgacggaagagagatagacgtttgagatattcaagccaatgattatttggtagaatagaattaaaatgtttggcttgaggcggtgaaagcagtgtctgttcaatggggaattgaacttctgaaaagtatcggtctgttttttttgcacccgatgttctggttttttatcatcataagtctcgcatgcggatatttgcggatcaaacgtgaacgccatacgtttcatacaaaaatcgcggatatgtatgacgagcttatctttacatacataaaaggacttataccgggtattcttctctccgtattattttttggactgggaatttcgattccattcggtcttctcggcataatcgcggctgtgacggctttggcttcgctgacgttccgtatgaattggctgtcctcagcttatattgtcagcgccggcatgttcattgcgtttatccttcagtatacccacacagtgccgtttgcggatcggtttccgcaggcattcggcgtgaattgggcatcggcggccgtgtttatgggccttttgattatcacggagggagcggctgcctgccgttcagcgcatctgaaaacatctccggcgcttgtcgtcagcagcagaggcctgcccatcggccgacaattggcgaatcgcgcatggctgcttccgcttttcttattggtgccgggcagcgggcttgagtcacacctttcttggtggcctgtctttaccgtgccgggcggctctttccatttgatctggattccttatatcgccggcttcggacagcgtgtgcaggggtcacttccggaagtcagcataaggataacagcgaaacgtgtcatgattctcggggttatcgtgaccgcattcggggcagcggccctttggtggagtccgcttgccggtgctgccgcttgtattgcggtgctcggacgcctgttcttatcattgagacagcggctgaacgataacgcggctccgttttatttctctaagcgggatcagggcttaatggtgctcggcatcattccgaatacgcccgcggaagatcttgagctgaagatcggtgagattataacgaaagtaaacggcattcccgtaaagcatgtatcggatttttacgaagcacttcaaaaaaaccgcgcatttgtaaaaatggagatcatcggcctgaatggtgagatccggtttgatcagcgcgcgtcctatgaaggcgaacatcatgaattaggtattttattcgtgcaggatgaacacgagcacgaagaaatgacagcattataatgtgatttttcataattattcggaatagtttcaagaactcctaaactagatttcaaaatcagctataaaagtaaaacggctaagaaaattatattttcttagctgttttattttgaaataataaaaaaataaatgaaggagaggtatggcttattggaaaggttattgctaactccaaaacctttagaagatgaatctttagcaggatatatattaagaataactgattataatggttatgttggataggggggagtacattataaaaaagcttttacttaagagattaccgttgatttcacttggagttatagcttacatactgacaaaatacgcgcagaaccatcaggattgggcggaaaaatacagtaggtctgtatatccgttattgtcaaaaatagtaggatttgtaccttcttgggtcaagttttctgttagtgaatggctcgtcgtgttggttgtgttactttttctattttatatcgtttattatgtgcgcaaggttatcatgagtaaaggtgtgcgtaggatggtagtttatcgtggtgctctaggaatcgttacgatctgtagcgtgatatatttttgttatactattttgggtgggataaactattacaggtattcttttttgtcttataccgaatataaagaagagaactacagcaaggaggaactggtcaaattgagtaagtcgcttgccgttgaaatggaattggcaagggaaaagttagcggacactgatcttttggctcatgtaccagaggtttttgattattatgcacaacacgcagtgttctcgatgcaaatgttatcaaagaaatatcctgttttggagcattcatattcaacaccaaaaccagtggtgatgtcaaaactaatgtcgcatgcagggatacatggtatttttgtcccttttacttatgaatccaatatcaatgttaatgtgccagtttttttggtgcctgctactatggcgcatgaattggcacatcagagtggtttcatgcatgaggatgaggctaattttatagcttacctggcatgtaagcagcaggatgatccaatgatactatacagtggtttatttctggcatttgattattctatatctgagctaaagaaagtggatccagataaggcgtctgatataatgtccagtctgtccaaagcggtgcggcatgatatagaacaaaatgagcagtaccgggataagtatgagggtgttatttcaagtatttcaagaaatgtaaatgacgtatatctgaaggcaaataatcagacagacggtttgaatagctatagtgatatggtgaatttgttgctggcagagcagcgagagatagagaagtacaattaaatgtatcttgaatacttataggtttatatagtaatgatagtgggctcaagttgaacataggagtgagtgaaataaataaaataaaagtatttcctattccatatgctggagcctcggtaaatgcatattatgaatggaaaaaactactgccggatagatatgaattgtgtatatgtgaattggctggaagaggaactcgattcacagagccttgttaccagtctgttggtgaagcaagtgaagatatcgccaaaagaataagtgaacaattagaatatgacgatgaatatgttatatttggacacagcatgggagccttattgacttatgagatatattataaacttaagcaaatgggaactaaggaaccaaggcatctgtttttttctgggcgagatgctccacatatttttgaaaagagagaagacattgaaaatatgactaatgaaactttcttgacaaaggtggaacaatatgggggaataccagaggagttttatacaaaagagattatggatatgtttcttccgattttgcgagcagattttataattttggacaattataagtttcagcccaaagcagaaaaaataagttgtggagtaagcgttttttatgcggatagcgatttttcgactcatatcaatgaaatgcataaatggagtgaagttgttgaaggaaacgtgaaatttcataagtttaaaggagaacatttttttttgaatcggtatcctaatgatattgtaaatactattgttaaagatacagagactcaaaatatttaccaggccacccacctggatcgcctagattttggtttagactttcttgtcccaatcaagttccaaaaataaaaatttagactttcttttctttgtacagtttgaatgtgttttgaaatattatatttaaaataaattttatcagtctgagaatccttcaatgattgttacttaattttgcttaattataaaagtaatattcaataattgttttaggtaggttttagtaaggagaattatgaaaaaaattaagaaaaaacattggaaataataagctttcagttttattaattatgaaaaatcacatataaaaagcccggtgccgctaacaacacggcggccgggctttttttacggcagcgccgaacttgatcggaattctcagccatttacattgcaacggcattgcggtgacactctgagagagaaaaataagaaggaaaactggaaaaggttccggaaagcgggtgctcacggaacctttttttgtttacgccgaatggctttttttcgtctgaacggtttccccggacttgataccaagcgatacgaacaagccgatcacagaaactccgatcaatatgataaacagaatatgaaacccggagattaaaccgatcagtgctgaagaaataatgcttccgaaataacggaaggtggagaaaatcccggatgcgatgccggacatgcccggttctaccgtcgcaagagaagatacctgcatgctcgtcagccccgcacctgacgcgatgcctccgacaataagcgatgccataagaaacggaacggaatgggaataaaccaaaagcagaaataagagattggctacggccatcagcccgaaggatagaaaaatcattcttcgcgcgccccatttctgatgcagctgagctccgccccagttgctggcggacatgaaaacagaaaagactgacagcgccatgccgctgtgcgacgtattcatgctgaagtggccggtcataaagagcggcataatcaataacacggcgtacatcattaaattgcttaatagaaccgacagattggcgctcgtaaaggtcgtgtttttaaacaggtcaaaatcaataatcggatgtttcgtgcgcagctcccgcctgaaaaatagcggaacaaatatgagaatgagcagcgcgtacacccaatagcccaaagagctttcatttttcgtcagaagaataatagatacaatgcttccggcaagcaaaacggacccgatgatatcaagcggagcgtcagacgtttcttctttatatttaggaaacatcactaatgccgtcacgagtgcgattgcaagaaacggaatgttgacccaaaagatcgaatgccagctgaagctctcaattaaaagagagccgataaacggaccgagagccgcgcccagcccggcaccgaggccgaaaaagccgaatactttcggaagccgtttttcagacacgacatggcggatgatggcgatgctgtttggcgtaagcaaagcgccgccggcagcctgaagcgcccggaagaaaatcaataagaaaagacttggcgagagggcgcaccccaatgatgcgatgagaaaaaggccgacgccccataaatacatttttttgtttccgtacatatcaccgagtttgccggcaatgggctgtgtcacggccatcacgattaaatacacggtcactacccatgtgatgctggcaattgattcgctgaatgagcgggaaatggatgaaagggcgactgcgatcatcgtagaattgatgggaacgagtatggctcccagcaaaagcgaaacgatcagcgcccattctttctttgaacccatccttcatcctccttggagccggaaaatgaccggccggtaatgcctttcatgaaaatctcagtgctgtgtttcagcatcgtttcctcagagagagtaatgactcttttccccagctgcagccggtgtataaaataaccgaaaatcatcgtcataaagacgtctgcattagcttcttcgctgccggggcttatcatatttttctttgtcagctccttaaagtaaacgattaaatgctttttcacggattgcggatatacgacaatatcctgcaggacgtcttcgaatagttccggttcgcgcaggcagatgcggaacacttcttttttttgttccaattgctgaagaagggtcgcggcgaaatgaagaagatcctcatacagatcgccttccgccttagtgatcatgctttccggaaccggcgtctgctgttcaatcatggctttcattaatccttgtttgtttttaaaattacggaaaatcgttgcttcgcttacttttgctttttctgcgatttcttttgttgtcgctgcgcggtatcctttttggatgatcagattcatcgcggcgtcaataattctcttgttcgtcgttctcaacatgtttcacctcgcgtaaatactggcaggacaagtatacacccgccctggccgtcaataaagagggaaacctagcatgaagcgcgtttgacaatcgtaatcttgccgtttgtcccgtccaccgtgacgatatctccgtcgttgagcctgtcagtcgcggcacgtgtgccgagaacggccgggagcccgtattctctcgcgatgatcgccgcatgtgacaggatgccgcccgtgtccgtaatgacggcctttgcatcctggaacagactggtccacagcggtgtcgtcattttgcagacaagaacgtctcctgttgaaaaacgggaaaattcacttgcgtcacgaatgactttcaccgggccgcttgcgattccgcttgacgccgcaagtccgtaaatttgatgttcagtgtttttttcatcttctgtgatggagccggtaatctgttcagccgttttcagctgttccgaagtcggagtcccgagataagcgggggcttcaagcaattgatattgctggaagagctgttttcgttgagcggctttttcctgcatcggaaccggcgacgccagcgctttctcgacttcatcgctgtataagtaccacatatcctcccgatcatcgattacgccttgtttttgaagcagctcgccgattttcagaaggcagaggcgcgctttggcgtccagcatcgcatcaatataaaaatggtgatcatctttgatgatggatgaagacaatgtccactgataatagcggtcaaacgtctcccggaagccgtcatcttcaattctatccataaagtcggtgtagagctgttttcgtttttctatcgttttatgaaactcactgtcaaaatcgtatccgttccggacatagttctgaatgttggccaaagcgaaataagggttttccgcccaagtttcttcaatgagatcatgacttttcacggatctccagccgtattcctgtaaaaattcaccgacttgttcgagaaagcgttttccctcatttgattgcagaagcgtctgatgcagctcgtcggcatgagaaaccgtaaagacgcgccgcagctcagggctgtcttttacttgtccggaaagcagccagagctgtctgtcggtctccaatgacttattcatgacgcctgccagcatttcgtacagaagggaggtgttttctttctcaacctgtccgtacatggattccagtatcatgtttaacgcaacctgcggaaagacaatattgaaatgttctgcgtatccttttaaatagaaatcttgcaggtttcggaatgcatcaagggcagtctccggcgtatggtctgtatgcgccagttcgtccagcttttgataaaaaggcagaaaggtttcctgaataatatcgtacatgcggtcagccaagacggggaaaagcgcttccaactgttctgcgggcagcttgtcgtccgtcttatgctgtctggaaaaaacacggccctgatgaagtttgacacgctcgatttcgatgcccattacagggaatgtcttcgtgctctctttgaggccgtattccaaagccggcacaatgagtgaggcgaataacgggctgacggggccttctatattggcctccatattgagccaaaaatctttctgatcccggggcgtcatgataaattcccgttcttcgtctgccgctttctgatcctgcacgatcgttgtaatcggtctggcctgaagcagatacagcttattttcggcaaatccgaattcgagatccacgggataaccgtacagttcttccgtctttatcgtcagcatggcaagctctttgacgctctcgtcatcaaggcagaagcggtttctcatgtcagcggacgtctctttttccgtcacgccttcgtctttagaaacgatatacatttcttttaagccgatttctttttcaatctgaaatgtgtctttattgacgataaatgtgtcgggcgtcacgctgccggagacgattgcttctccgagaccgtagctcgcgctgatcatcagctctccgtcatcatgtgtgaccgggttgcggctgaaaatgactcctgaaacctcggaattgataagcccttgcacgacaacgcccattaacggttctgcggtgtcattgttcattttctctttataaccgctgacccgcgccgagaagaaggaagcccagcattctttcacttttccgagaaactcttcttctgttttgatatttaaataggtttcgtactggcccgcgaaagaagccccttcaagatcttcggacgcggaggaggaacgtacggcgacagaggcgtatgattctctcaattcataaaacgacgcggtcagttcctcccgaagctcttttgaaaacgtgccgttcataatggcgcgctccatctgttcctgatctgcttgaagcccgttgtcttccataaaacgtgtcagggcattcgtctgaatgatgaaaccgccgggaacgggcagcccgtttttcgtcagtttaatcaggttcattccttttgctcctgcagagcggctcgattcttccgctttttgaaatcgcactgaatacatgcggtatgaccccctttttttcttcatccaagaaaatgatagtaaacactatcattacattgtaaagagggaggaagaaactgtcaaagatacaaagacctaaaccttctcatcctttcggctgaagaaaggtaattcgattcatctggttaatggttcaatggatttatattcacaatttttttgacagatgattgaagactgctgaaaaagggtattgtgatagcaggggaacgattgtccgattcttcattttttactataatcagatgagatgaagaattcccgaggagggtttttgtgattacaaaagccgtttttgcattatgtttcccttttatgctggtcgtcctttttacgcgcgtcacgtttaaccactatgtggcgatcgctctcacagccgcactgcttttcgcatcctatttaaagggttataccgaaacgtattttatcgttggattggatgtcgtatcgctggtggccggagggctgtacatggccaaaaaagaagcagacaaaaagaaagacaatgcctgacatggtgaatatgaaatagaatgcctgcttttacgccataaaagcaggttttttatacaaaaattgacttggtaaaaacaaaccatcgaactttagttcgtatttttagtgattttgcccgtcattgtgttactatatcaataggaagatttcgtaaagaaacggaggcttttttgtgaaagatcgttttgagttagtctcgaaatatcagccccagggagatcagccgcaagcgattgagaagcttgtcaaaggcatacaggaaggcagaaaacaccagactctcctgggtgcgacagggacgggcaaaacctttaccgtgtccaatctgattaaagaagtgaataaaccgacactggtcattgcccataacaaaaccctagccggacagctgtacagcgagtttaaggagtttttcccgaacaacgctgtcgaatattttgtcagctattacgattactatcagccggaggcgtacgtgcctcaaacggatacttttatagagaaagacgcaagcattaatgatgaaattgataaactgagacactccgcgacatcctctctgtttgaacggagagatgtcattattattgcgagtgtgtcatgcatatacggtctcggttcacctgaagaataccgggagatggttgtgtcgctcagaccggaaatggaaattgagcggaacgagctgctgagaaagcttgtggatatccagtatgcccgcaatgatatcgactttcagcgcgggacgttccgcgtgcgcggagacgttgtggaaatctttccggcttcccgtgatgaacattgtatcagagtggaatttttcggagatgaaattgagcggatcagagaggtcgacgctttgaccggagaaattctcggcgaccgtgaccatgtcgcaattttcccggcttcccacttcgtcacccgggcggaaaagatggaaaaagcgattctgaatattgaacaggagcttgaggagcgcttgaaagtgatgcacgaaaacggcaagctccttgaagcgcagcggcttgagcagcggacgagatatgatcttgaaatgatgcgggaaatgggtttttgctcagggatcgagaactattcaagacatttgacactccgtccgccgggctctacgccgtatacgctgcttgattattttccggacgattttatgattgtcgttgatgaatcacatgtgacgattccgcaggtgcgcggcatgttcaacggtgaccaggcgagaaaacaggtgcttgtcgatcacgggttccgcctgccgtcagcgcttgacaaccgtccgctccgattcgaggaatttgagaaacacatgcacaatatcgtgtacgtgtcggcgactccaggaccgtatgaaattgagcatacgccggaaatgatcgagcagatcatcagaccgacgggactcctcgatcccctcattgacgtccgtccgatcgaaggacagattgatgatctgatcggcgagattcaggcgagaattgaacggaatgagcgcgttcttgtgacgactttaacgaaaaaaatgtcagaggatctgaccgattatctcaaggaaatcggcatcaaggtcaattatctgcattccgagattaagacgcttgaacggattgaaatcatccgtgacctccgcctcggaaaacatgatgtgttaatcggcatcaacctgctgagggaagggcttgatattccggaagtgtcacttgtcgccattctcgatgcggataaagaaggcttcctccgttccgaacgttcgctgattcagacgatcggacgggcggcacgaaacgcggaaggccgcgtcatcatgtatgccgataaaatcacgaattcgatggaaatcgcgattaatgaaacgaagcgccgccgggaacagcaggagcgctttaacgaaattcacggcattacgccgcaaacgatcaataaggaaatccgcgatgtgatccgcgcgacgcaggccgctgaggataaagaagaatataaaacaaaagccgcgcctaaactggcgaagatgacgaagaaagaacgccagaaagtcgttgagcaaatggagcacgaaatgaaagaagcggccagagcgcttgatttcgagcgggcggcagagcttcgtgatttactgttagagcttaaagcggaaggatgatgaacacatggcaattgaccggatcgaggtgaaaggcgcgagggcgcacaatttaaaaaacattgatgtaacgattccgcgggatcagctcgtcgtcgtgacggggctgtccggatcgggaaaatcatcccttgcctttgacaccatttacgcggaaggacagaggcggtatgttgaatcgctttctgcctatgcgcgccaatttttagggcaaatggataagccggacgtcgatgcgatcgaagggctttctccggcgatcagcattgatcagaaaacgacgagccgcaatccgcggtcaaccgtcggaacggtaacggagatttatgattatctccggctgctgtacgcgagagtcgggaagccgcactgcccggagcacggcattgaaattacgtcgcaaacgattgaacagatggttgaccggattcttgaatatccggagcggacgaagcttcaagtgcttgcgccgatcatctcaggcagaaaaggcgcccatgtcaaagtgcttgaccaaatcagaaagcaaggttacgtaagggtgcggattgacggagaaatggccgagctttccgacgatattgaacttgaaaaaaacaaaaagcattccattgaagtcgtcattgaccggattgtcgtcaaggaaggggttgccgcccggctttccgactcactggaaaccgcgctccgcttaggggaaggccgtgtcatgatagatgtcatcggtcaggaggagctgatgttcagcgagcatcacgcctgtccgctgtgcggtttttctatcggagagcttgaaccccggctgttttcgtttaacagcccgttcggcgcctgtccgacttgtgacggtctcggcttaaagctggaagtggaccctgagctcgtcattcccaatcctgagctgtcattaaaagaacacgccatcgcgccgtggacgccgatcagttcacaatattatccgcagctgcttcaggcggtctgccgccattacggcattgatatggagactccggtcaaagacctgccgaagcatcagcttgataaagtgctgtacggtagcggcgatgaacggatctactttaaatacgagaatgatttcggacaagtgcgcgaaaatgaaattgaatttgaaggcgtgctgcgcaatattgagagacggtataaagagacaagctccgattatatccgtgaacagatggagcagtacatgtcacagaagccgtgcccgacgtgcaaaggctaccggctgaagaaagaagcgctggccgttttggtcaacgggcgccacatcggcaccattaccgagctttccgtcggcgatgcgctggaatttttcaaaagactgacgctgtctgagaaagatatgcagattgccgatttaattttaagagagattgtggagcggctcagcttcttagataaagtcggtcttgattacctgacgctgagccgggcggcgggaacgctgtcaggcggagaagctcagcgcatcaggcttgcaacacagatcggctcccgtttgtcaggcgttctgtacattcttgatgagccgtccatcggccttcaccagcgtgacaatgaccgtctgatcagcgcgttgaaaaacatgagggatctcggcaacacactgattgtcgtggagcatgatgaggatacgatgatggctgccgattatttgatagatatcggtccgggcgccggcattcacggcggccgcgtcatatcggcggggacgcctgaagaagtgatgaatgatgcggactctctgaccggacgttatttgtcaggggctcaattcatcccgatgcctccggagagaagaaagcctgacggccggttcattgaaatcaaaggcgcgtcagaaaacaacctgaaaaaagcgaacgccaaattcccgctcggcacttttacggcggtgacaggtgtgtccggttccggaaaaagtacgcttgtgaatgaaattctgcataaggcgcttgcgcaaaagcttcataaagccaaagcgaaaccgggaagccataaagagatcaaaggcctcgaccaccttgataaggtgatcgacatcgaccaggcgccgatcggccggacaccgagatcaaatccggcaacttatacgggtgtgtttgatgatatccgcgatgtattcgcgcagacaaatgaagcaaaggtgcgcggttataaaaaaggccggttcagttttaatgtaaaaggcgggcgctgtgaggcctgccgcggcgacggcatcattaaaattgagatgcatttccttcctgacgtgtacgtcccgtgtgaagtgtgccacggcaaacgttacaaccgggagacgcttgaggtcacatacaaaggaaaaagcatttctgacgttctggatatgacggtggaagatgctctgtctttctttgaaaatatcccgaaaatcaaacgcaagcttcaaacgcttgccgatgtcggactcggttatgtgacgctcggccagccggcgacgacgctgtcaggcggagaagcgcagcgcgtcaagctcgcttccgaactgcataagcgttccaccggccggacgctgtatattttggacgaaccgacgacaggcctccacgttgatgatatcgcaaggcttttggttgtgcttcaaagactcgtcgataacggtgataccgttttggtcattgaacataatctcgatatcattaaaacggctgactacatcgtcgatctgggacctgaaggcggatcgggcggcggcacgatcgtagcctccgggacgcctgaagaagttgtcgaagtgaaagaatcatatacgggccgttatctgaaaccggtaatggaacgtgataaaaaacggatgaaaacattgctggccgaaaaagaaacggcagccacgtaatagatcaataaaaacagcccaaaactcatcggttttgggctgttgttgttacaggctttttttctgttggggaagctgtctgcttaaatgcattaagtcctgcagaatatgggtgctgctgctgtccagcagcacttttatatattggatatcatgggaaatgggaagaggggctgctttgatctgttccaattcagccagcatttcgctgttcattcttttctgttcgcgaattaaatttcgaagactctcttccgttacttgggcgtttttgggatctttctccatttgtatgtcctccttgcatacggtcaggctttgttacatattgtaatcggttcggggaaaagattctatagtgaaatctctgaaatcaaaaattacgtataacgaagcatgtccttagcatgaaaatgaaacccgcccattcgtcatacgtatgtataaggaagggtttttacatcacggcacagggagtgtttttattgaaccgaaatcaagcgattatcgcatcaatctgttatttcagcgtgtttctcgcgccgctcattcttccgattgtggcttactttgtcgtcgatgaaaaagagacgaagcggcatgccatgcgcgctctgatttcccatatcattccgtttgcgggattgctgattgtgaccgcgggtgttgtcggcggattgattacggctcagggggagagtatggtgcccgtttttgttatgataacaggagcagctgtttattttctgatcctcatcggaatggtcatttggaatatcgtgcagggaattaaggtgttacgccaggtgtaagaaaagtcgggggaggcgttttgtatgaaacaggagaaagaacggattttaaagcttgtggaagacggcatgctgacggcgcaggaagcactgacgctcattgaaaaactggatcatgaatataaagaaaaagaagagcagatcaccgcattatctgcggaggtccaggaacctgcggaagatttcgaaagcggggcaaaaggaagccaaaagccgtcgctcggggcgaagctgttcgactggattgattctgccgtcaaaaaagtgaaggaagcggatcttgatctgaatttcggccacgcacacgaagtgcagcatatttttcaatttaaagacagtgaattctcggccattgatatgcagattgcaaacggcagcgtcaatatcgtgccgtgggcggatgaagatatcagagcggagtgccaggcgaaagtgtaccgggcggacagtcaggaggcggcgcgcaccgcatttcttcagcacattgagtgtgaagtgaagggcaataagttttttgtccgcacggaaaagaaaacgatgaaaaccaatgtcacgctttatgttccccagaaagagtacgataagataagagtgaagctgtttaacggaccgatcagaggggaacatttacatgtaaaagaattctcggcgaaaacgacaaacggcgttctgtcattctctcatttgacggctgataaagcatcggcggaaacggctaacggacaaatcaagctggccggacatcaatgcggagcgattgaagcggaaacgatcaacggcttgattgatttgcgcggatcgagtgaatccattgacgttcaaagctttaacggcaatatcatgcttaccgtgacagcgccgcactgccgctccatctacacgaaaacgacgaccggaaacgtggatatcgctctgcctgatgattcggcggtgaaagcggagctgaaaagcaatctcggctctctcagccatgagctgattgatgcggaaattttaaaggaaaagaatgataccattcaaaaagaactgatgctggcatcaaatcaaggccatgatcagcatctctcgattttctcagaatcgttaacaggagccattaagctcaagcatactcagaggtgattggatgaaaagactttaccgttcagaaaaaaaccgtaaaatcgccggcgttgtcggcggtttggcggagtacgtcaatatggatgcgtcgcttttacgcattatcaccgttgtattagcgcttgtcacgagcggaatcgtgccgattgtatatattatctggtgttttgttgtacctttagaaggagatttgaaataaatgatcaaatgggcagtcagcattttagtaaatgctttattattaatcgttatcgcgggatattttgattccgtccatatcagcagtatcggagcggctgtcatcgccagtgtgattctttctgtgttaaatgtactgatcaagccgatcatcgtcatattgacattgcccgtcacggttgtgaccctcggcctctttctgtttgtcatcaacgccattacgttaatgatgaccgcagccttgatgggagacagctttcagattgatgggttcggcactgccatttgggcatccgtcgtgctgtccgttttccacttgctgatccaaaaaggcatattggagccgcttagaaaaaggtaaaaaacgagctgtcccgagagggcagcttttttatgtgtgatttacataagcggcagcctcctgacgcaacataatgcatagggaggtaatgagatgaaacttgtgatgacgctcttttttctgattggtttgctttgtgtgagtccttctgcggatgcggcgcgcaaagaatcggcaatccccgtgaatcagcaggaattcggacagccgcctcattacataccgcttctggagaatcctccccaaatcgaagtaaaggcggaaatgaaaagaaacctgttcatacaggctcatgtacggaatgctgactatcaagcgttttcggcgtttcttttttataaacaaagcaatgagctgggatttaaaatggtgccgatggagcccgcgccaggcgcaatccggctgtttacggcccaggtttcaaagcgggatatctggaatggagaattggaatattacctcgttttcaccaacggcagacagcgggcggaatcggagaaaaagcggctgaagctggacggctatcaagccgatttgaatcatattcccgagctgatgattacggagcttgcggttgatacgaaaaatgaagacggcgctgatgcctatgaatttatcgaggtgtataacacgacggacagacccattcattttaaagactatcacatccgctaccgctatccgaaggaagggccggaatcagatatgatatggagaccgaaagaagataccgtcattccgtcaggcgggacttacgtgttttggctgagacgcgccgcatcagaactgacgatagatgatttcaatcgctattacgggacacgcctgaaggagggagaacatctcgccgtcatcgaagggacggacggaatgtccaacggccgcccgcgtacggtggtgctgtcggcaaataccggaaagggtatcgcctcagcgcattaccggaaacacgctttccgccggctgacttctttgctgtacaaatatccgctgaacggaacgggagaattgctgaggatctccacgagcgagcataagccgtcaccgggctctgtttttcaggcgcagatcccgcagcagaaaagggtgataaaacccgacaagaaaaaaccggtcatcgaagaccttacagacagaaagcccgtccggcccgctgaaagcattgaattaaaggctgacataaaagacaaaaaccttgtcaaaacagccgcgttttattaccggaccaatgagaaaaaaccattcaaacgaattctggccgaaaaagaccgcaacgacagcttataccatcatattctttattccccggaactgctcggtcaggatcagcttgagtattatatcgcagccagtgatggagaaaatgaagcaaaaacgcccgtcaagatgattgacattgaacagacgagcaaatcacacggactcagaatgaatgttgaacccgaagatacgatatccggcacctatctgctcaaagcgacttccgacgtcagccccgataagatcaagctgtggattgacggcaaacggcaggagacccggccggcgctggaaaaagaggtctatttcgccttcgatgcccggaaaacgaatctttattttcaaaacaccgtcataatggaaaatgaggtgctgcacatttttgacgatccgtctcaccgttacagaacgcactcggttctccttccggaacgtctgctacaaaaagggggcaaaacacagaaagtatccatccgttcgggctcaaaggtttctccgtatgacacgggagagaatcgggatgattttgtggtgaaacatgcccgtctggtgctttcggatggaacggtgatcaaagacgggaagacggatccggctgagcagctgtttatcggtgacggcaggcgggcgaatcagcagaagaccttctcattcagcctgccggatcatttgtttacgtcacggctgctgccgtggaacacggcgaagctttctgaaggctatcaccatatttttgttagcgacggtgaggagcagctgagccaatctgtgcgggtggacaatacggggccgaagattgtcccgggtatcaaagaaggcgcggcgctgaaaggtaatgttgagctgaatgcggacatccgtgataaatggagcaaagtggaagaggtcaaagcgtttttggacggagaaagcattacgctcccgcatcacacgtcatcagccgatctcaagcccggaaaacatacccttaccatcattgcggcagaccttgccggaaatgaaacaacgtccgtccgcaccttccatatcaaacgggaggagccgaaccagccggagcttgcggatcaaaaaatcggcgcccacaaagcaaagctgtccgtccgggtaaaagacccgacgaaggatgacatgaatgtatcattttatcgcggcttccgttataccgcgcggaatccgggcagcgtgaaagtgtataaacacgcctcattaacggaaccgccgaggggcataaaagaaaatgaaatgccgtttaccctgccggaaatgaaccgcatctcggcaaatgacggaaaaaccgtatcgacggaaagtgtggagcgttttccttatcaccgattcgaagtctccgttgacccgtctatcgacgaaacggatctggccgaggcggtctggaaaggaagctctctgcccggccgaaaggtaaccatgtatatttggaattaccggacaagccgctggcaggaggcggacagcgttcttgccaaagataaaaagccgtttacattaaaagccgccgtttccgcagcggatgcggtgaagaactcaaaaatgaatgtcatcgtgcaggatcaaataccggcgaaaggcaattacacgtttgtctggatgtcggatacacaatattacgcacaaggacacccgcacatttttgacaaaatgacggagtggatcaaagaaaataaggaaaagcacaatattaaatatgtctttcataccggtgatatcgtcgatgattcaatggtgatgaaacagtggaaaaacgccgatcactccatgcggacacttgacaaggcggggattccgtacggagtgcttgccggcaatcacgacgtcggccataaagacggcacatatcgaaccttcggggatttcttcgggagccgccggtttgaacagaacatgcattacggcggatcatataaaaataaccgcgggcattatgacctgctgtcggcaagcgggaacgattttattatgatttatatgggctggggcattgcggaacaagagattgactggatcaatcaagtgctgaagaggtatccggaccgaaccgccatcttatgctttcatgagtacttgcttgtcagcggaaatcgaagcccgatcggggaaacgatctatcgaaaagtcgtcaagccgaatcgcaatgtggcgatggtattaagcggccattaccataacgccatgaaaaaaaccgatgcgcttgacgatgacggggacggaaaaccggaccgcctcgttcaccaaattctgaccgactaccaggacggtccggaaggggggcagggctttatgcgcatgatgcaattcgatcaggccgccaatcaggttcacatgttctcctactcgccgtacacggatgacatcaattactatgacaccgatctgttcgctgataaagacgaattctcagcagaaatggatttacagccgaagaggaaaagggtggcgaccgattattttgaatgcaacgtctatacgaacgaactgctcggtcataaaaaacacgtaaaaagcggaaaaaccgcaaattgggtctgggacggcctgcagcctgattccgtttattactggtacaccgtcgttaaggacccgtacaacggcaaaacaatatcaccgctgtggatgttcaaaacgggaaatacgccgtatcgcccggctccggatcagtttgatttcaggcatgcctcaaacccataacgaaaaaaatacagcctgctgatcgctcagaagaaaatctgacggtcagcaggattttttctgtgcgtaaatggcggcgccctgctgtgataagtgcttttgacttttttatgtcccttttctatactaaaatcgattggttttcgtaatatgcaggaggaaacataatgaacagtaaaaccgggacaaaagaaagaattattcaaacctctgcatatctttttcagattcagggatatcatgcgactggtttgaatcaaattataaaagagagcggagcacccagagggtctgtgtatcatcactttccaaacggaaaagcagaactcgccattgcggcgatcaaatatacgggaagatgcgttgaaaagcaaatacagaatagtatgtctcaattcgcggaccctatagaagcgattcagcactttattcatgtaacggctgaacagtttaatgatccgcagaatattgagggcgtgccggttggattgctggcgggtgagaccgctctgatcaatgaaacgttaagatgcacatgtgttgaggtgttcaaaaagtggacggatgtgtttgcggcaaaatttcttgagcatgggtttgaacaagaggaagcggagaagctcggggtgacaatcaactcgatgattgaaggcgcaatcatgttttcgctggctcataaaaacaaagaaccgctgctactggtttcaaagcaggttccgtatattgtccaaaacagagggtagcattttattactcttttctttataaaaatagatgccagaaccacagcctcttcgttttgccagagtcatagagaacattcaccggcttgatttgaaaatggcagatcaaaaaaacatctccaacccgtaacggttggagatgtttcatttcaccctgtccatataatgcacgaatgtgtagcggtcgcctctgtaggcggatctgacgtgctcaaaggcagtgccgtcctgcagataagtggtccgcttgatatagaggacgggggcgccgggctggataccgagcagctcagcttcttcctcggaagcggctcccggttcaagctcttgttttgcccgtgagatcggcatctgattgtacgcttcaatatgctcatacatggatgattgaaaatgagaggcgtccagttttcccgctttgtcaaacggaatgtacgaggcttcaatcgccatcgggatatcatttgccagccggacgcggatgattttatgaagcgttgccggatagccgcatcccaggatagaagataattcttccgtcgcctgaatcagctggtattcggcaagtctgctccccggcttcatgccccggcttctcatatcttccgtaaagcttgtcagcccttgaagcggctgttccatcttcagtttgctgacgaacgttccccggcctttctgcctgtataaaaatccttcattcaccagattggaaagcgcctggcgcaccgtcattcggctgatgccgaattgttcggcgtattcccgctccgacggaagcagcgcatccgctttcagctcgccgtttttgatttgtgtttttaattgttccataatctgaaagtaaatcggaatcggagattgtttatcaatctgcataggtcaaatcctttcaatcgccgcccgcagccttttcatcaatcaagaccgtcacatccggatgcgcgtgcagggcggaggcggggaatgcttcgctgacgcacccgtccagaagctgcttcaccgcttgggccttgctttttccggatgccatgatcaaaatccgtttgccggacaaaatcgtcccgatccccattgtcagggcttttacagggacctgatcaattgacggaaagtaccgcgcattcgcctgtcttgtctcttcattcagctcaacgacatgggttcgggattcaaatagcgtcccgggttcattaaagccgatatggccgttgtgtccgatgcctaaaagctgtatatccgctccgccgagtgtttgaatcaatcggtcatagcgtccgcattcggcatcaagatcgtctgcccgtccgtcagggagaaagtggcggtcctttcggctgtcgatatgtgcaaaaaaatgtgtattcatataataatgatagctgtttttgtcctcgggagaaagcccggcgtattcatcaaggttgatcgtcgtgacattccggaatgacaagccttctgagcggtgcatccgcacaagttctttgtatacgccttcaggggtgccccccgtcgcaaggccgagaacggcatccggcttttgtttcactgtttcagcaataatcgctgcggctttttcacttaattcttcataatgtctgcatgtgataacgttcatgtccaatcagcctcccttgagatatatgcggtgtttccgcggcaaatcgttgccagcacgccgcactgtccgtccgtcagaacaacgtcggcgtcttttccttccgcgatgcttcctttacggtcgaatatgccgaggcggcgggccgcatttgccgatgtcatatttgctatatccagccatgagcagtttgtaaacctgcgcatgagcgccgcgccttcattcatttttaaaatggaaccggccagcgtcccgtcagagagaagcgccgtgtccccgcgaacggtgactttttgtccgccgaattcgtattctccgtccttaagcccttttgcccgcatggagtctgtaatcatgatcaggttttggcttcctttcgccaaataggcaagcttaacggccaaaggatgagaatgaatgccgtcggtgatcagctccgccgtgatacggccgcaggcgagagccgtaccgatgccccccggctcacggtgatgaaaggagctcatggcgttgaagaggtgcgtcatatgcactgccccggcatccgccgctttttgtaaaagctcggctcccgcgtctgtgtgtcccattgacgggatgatgttttggtcttttaaataacggatcaggctgaaatcagaatcttcttccggcgcaagcgtcacgattttgatcagccctcccgagagccgctcccatttctgaaagagcccggcatcagcaggagtaatccattgtttcggctgtgctcccgcctttttcggagagacaaacggtccttctaaatgaatgccgatcaactcagcgcctttttgggcctgcggtgaggaagacgtccattttttggcgttgacgagcgctttttcaatgttttcgtgctgctgtgtgatcgttgtcgctagaaaagaggttgttccttcttcgggcagccgggcggacattgtatcaagagctgcaacatcagcatccatcgtatccgcgccgtatccgccgtgaatatgaatatcaatcattccgggaagcgcatatgaaccctcgggcgccttccattccttctcatacgtttcttgcggtcttgttttccccgcgtaagaaatgatgccgttctttataccaagaaatccgtttcggatgatttcttcttctgttacgatgtccgcaccgctgattaacaagctttcagccactttaaaacacgcctttctggttagttgttagttttattttactccttttcagactagttatctataccagttatgccggaattgtataaatctgttttggttcagacggtaaagtgataaaatataactgttcaaagctcggaacatcccagaacaggaggaacatatcttggcaaaggttcggaccaaagacgtaatggagcagttccatttagaattgatcagcggagaagaagggattaaccgcccgattacgatgagtgatttatcacggcccggtattgaaatcgccggttattttacatattacccgagagaacgggtgcagcttttaggaaaaacggagctgtcatttttcgatcagcttcccgaggaagataagaaacagcggatgaaatcgctgtgcaccgatgtgacgccggctatcatactttccagagatatgccgatcccgccggagcttgtagaagcttccgagcaaaacggtgtgcctgtgctcagatcccctctgaaaacaaccaggctgtcaagcaggctgacgaattttcttgagagccgtctcgcgccgacaaccgccattcacggcgtgcttgtggatatatacggcgtcggcgtgctcataacgggaaaaagcggcgtcggtaaaagtgaaacggcgctggagctcgtcaaacgcggccatcgtcttgttgcggatgactgcgtcgaaatccggcaggaggatcaggatacgctcgtcgggaatgcgcctgatctgattgagcatctgcttgaaatcaggggtctcggcattataaatgtcatgacgctgttcggagcgggcgccgtcagaagcaataaaagaattacaatcgtcatggaccttgagctttgggagcaagggaagcaatacgaccgtctcggacttgaagaagaaaaaatgaaaatcattgatacggaaattacaaaactgaccattccagtccgccctgggcgaaatctcgccgttattatcgaagttgcggcgatgaacttcagattgaagcggatgggcttaaatgctgccgagcaattcacgaataagctggcggatgtcattgaggacggcgaacaagacgaataggagttggcaatgatatgaatgaagcaggaacaccaatcaatccgattgcctttcagctcgggccgttatccgtgcactggtacggaatcattatcggcgcgggcgcgttattagggctttggatggccatgagggagagtgaaaagcgggggctgaaaaaggacatttttattgatcttgttcttttcgccatcccgatcgcaatcatttgcgcaagggcatattatgtgcttttcgagtggagctattactcggaacaccccggggaaatcattaaaatttggaaaggcggcattgcgattcacggcggattaatcggcgcgatcgcaacgggaatcgtcttttcaaaagtaagaggcatctcattctggaagctggcggatattgccgcgccgagtattctgcttggccaggccatcgggcgctgggggaactttatcaaccaggaggctcacggtgaagcggtcagccggtcatttttggaaagtctgcatcttccggatttcatcattaatcagatgtacatagacggacaatattatcacccgacgtttttgtatgaatcgctgtggagttttgcgggcgtcgtgattctgcttctgctccgccgcgtgaacctgcgcaggggcgatctgtttttgacgtatgtgatctggtattcgatcggcagatactttattgagggaatgcggacggacagcctgatgcttacgagccagcttcggatcgcgcaggtcatttccattgtgctgattgtacttgcgattattttaatgattttcagacgcatgaaggggtatgccgataagcggtatgcagatacggactgacgtctgaaatcggaaaggacataagatgactgataaacgtgtaaccgccattttatttgatctcgacggcacgctgattgacacgaatgaactgattatcgcttcttaccttcatacgcttgatcattattgcccggggcagttcaaaagggaagatgtgcttccgtttatcggcccgcctctgtatgaaacgtttgcaggcattaatgctgaaaagtgcgatgagatgatcagcatgtacagagcattcaaccatgaaaagcacgatgagctcgtcacggagtacgaaacggtttatgaaacgcttgatgaattgaaaaaagcggggtatcagctgggtattgtcaccacgaagctgagggatacagtcaatatgggattgaagctgacaggcatcggggcgtttttcgatactgtcgtcacgcttgatgatgtcaagcatccgaagcctgaccccgagcctgtgcggcttgcgctcggccggcttgggtgcgatccgtcggaagccataatggtcggtgacaattatcacgatgtcatggcgggcaaaaacgccggcacgaaaacagccggcgtcgcgtggacgattaaaggcgcacagacgctttccgcctatgaacccgattatatgctcgagaaaatgagtgatttattgcacatcaccggagtgaagtaatccatgagaaaaacagaccgccatccggtttcaggtgaaaattcattgtggcatgtttatcagacggttcccttcctgaaggtgatgaaaaatttcatcatcattcagatcgcaaggtatacgccgtttttaagcgtgaaaaactggctgtatcgaacctttttgaaaatgaatgtcggaaaacagacgtcattcgcgctgatggtgatgccggatatcatgtttcccgaaaaaatcactgtcggaaaaaacagtatcatcggctacaatacgacgattttggctcatgaatatttaatacatgagtaccggaccggttttgtcacaatcggtgacgaggtgatgatcggggcaaacacaacgattctgcccggcgtcaccatcgggagcggagccgttgtatcagccggcacgctggtgcacaaagatgtcccggccggggcgtttgtcggaggaaatccgatgcaggtgatctatacggacgaagaaatgaaaaaacgaatggaaaaccccgctgattaacgtcagcggggtttttttatgacttgatcacaatggcctggctgcccatctgcttccaggctttttcaaagtcagatcggtctgtttttctgtttttatagccgtaaggatcattaacgtatacataatcgtgatcataaccggtaacggctacgctatgcatgctgaacgtaatgtcgatttttccgttcggcgtattccaagtctgcatattatcaaccggcttaaaggatgtggtggtaatcacccagaccggccgccctttttcaagctggcggtacactgaagaaatgtcttttcccgtcaggtcgtatactttgtttcccgcatattctttggcaagtttatcaatcggctcatgataaacgcctaaacccgggccgttttccatatctccggcaaatccttcattcggatctcccttcagcccgctgctgtaagtgagcggaactttattgatcttatccgccaatgtattttttgacacatgatatccggcattattcaaaatcatggcaaggcttgtcacctcacagccattgtacagtctgggagaatccatctgtctgtacagaacgacattcagcggtgacgcgctcccttttaacggtgttttctcatcaggctcgtcggactgctgattaaaaaaattcaaatgaatatcgtttgtatagatgttatacccgagatagacaaggatggctgtcagaatcagcacacataatgttccaagcgtcttcattattactctcccttgttctgatgaagctattctatgtattatagcacttctgctcaatatgattcgatcgttccgatatgtttacaggtttgttcattctttagccatgtttatggaaaagaataggcggacattgggcgttgcaattcattcttttatctgctaacatattatcatattagcgaactaaaggattcggaattttccttcagacaaagcggaggtgtgaaaggcaaatgtttatgtttgagaaaccgcatggcatgagagatacgctgcccggtttatatgaagcaaagaaaaaagtccgttccacactgacggatttaattgataaatggggttatcagtttatggagacgccgacccttgaattctatgaaacagtaggcgtccagtcagccattgaagaacagcagctgtttaagcttctcgaccaggacggaaaaacgcttgtgcttcggcctgacatgaccggaccgattgccagggtggcggcgtctaagctgcacaaacacaatcatccgctcagagcggggtacgcggcaagcgtctatcgcgctcaggagcgggaaggcggacgcccggccgaatttgaacaggtcggcgcggagctgatcggcgacggatcaacaagcgcggacgccgaggtgattgcgctggcggccggcgctttgaaaaacgcgggattgcaccaatttaaaatcgcgatcggccatgccggactcgcagatgagctgtttgtcgaggttttgggcaatgccgaacgggcggatgttctgcggcgctttctctttgaaaagaattacgtgggatacagggaacatgtcaaatcgcttccgctttcttcaatagacaaaagccggctgctcgcacttctggaattgcgaggcgggaaagagatctgcgccaaggcggaggagatcatcggcatctccggacaaagcttgattcaggagctggaagacctgtgggacattcttgaggattacggatgtgccgagcatattcgccttgatctgaatatggtaagccatatgagttattacacgggaattttattcgaagtgtatgcggccaatgtcggttttgtcatcggaagcggcggacgctataacaatctactcggccatttcggcagccccgctcccgccacgggtttcgggctccgtatcgacaggctgattgaagcgctcggcatccaggaagaaactagtgaagcggacgccgtgattttcagcaaggagcagcgggcgcaggccattttattcgcggaggaagaaagggcgagaggcagaaaagtcgtcctgcaggatctggcgggcattgaaaatatcgatcatatgacaaaatcattcgcaaacgtcacatactttatcggtgccagaaaggaagagcagaatgggtaaggtactcacaatggcaatgccaaaaggacggatattcgaagaagcggccgggttgctgcggcaggccgggtacaggctgcccgaggagtttgaagaatcgagaaagctgatcattgacgttcctgaagaaaatctccgctttattctggcaaagccgatggatgtgacgacttatgtcgagcatggcgtcgctgatgccggtattgccggaaaggatgtcatgcttgaggaagagcgtgacgtgtatgaggtgctcgatctgaaaatcagcaaatgccatctcgccgttgcggggcttcccggagcggattggaacggagtcgccccgaggatcgcgacgaaatatccgaatgttgcgtcaagttatttcagagagcagggcgagcaggtggaaatcattaagctgaacggttcgattgaattggcgcctttaatcgggcttgctgacagaatcgtagatatcgtatcaaccgggcggacattaaaggaaaacggtctcgttgaatcagaacatatttgtgacatcacatcgcgttttatcgtcaatccggtcagctaccgcatgaaggatgatgtaatcgacgaaatggcggccaggctggccaaggttgtggaaggagaaacggcaaaatgaaaataaccgcaataaatagaagcgagcggttctcactgaagcgttccatcgacagcggaaccgaagagcagcggaaaaccgtcagggggattattgaagacgtcagacaaaacggtgacaaagccgttttggcctatacaaaaacatttgacggcatcagcctgaaccaaatggccgtgagcgcagaggaaatcaccgaggcataccgtctgcttgatgatcagctgctggaagtgatcagacaggcgattgccaatattaaagaatatcacgaacgccagctgcaatcctcttggttttaccatcgcaaagacggcacgatgctcgggcagaaaataacggcgctcgattccgcgggcgtatatgtgccgggcgggacggccgcttatccgtcttccgttttaatgaatgtcatccccgctctcgctgcgggagtggaacggatcgttctcgtcagtcctccgggaaaagacggccgcctttcaccgggcgttctggccgcggcgtctgagctcggcataaaggaaatttacaaagcgggaggcgcacaggcgattgccgcgctcgcttacggaactgaaacgatacagcctgttgataagatcacgggccccggaaatatatttgtggcgctcgcaaagcgcgaagtcttcggcgttgtggatattgacatgattgccgggcccagtgaaatcgtggttctggcagacgatacggcggtgcccaaagaagtcgccgctgacctgctttcacaggccgaacacgatacgctcagctcaagcgtgcttgtcaccgactcacggaagcttgcagaagcggtagccgatgaagtggataaacagcttcagacgctgccgcgtaaagaaatcgccgaagcgtcgatcagggatcacggccgcatttatatcgcggaatcgatggaagatgcagtggacacggtgaatgcgctggcgcccgagcatttagaaatcatgacgcattcgccggaggctttgcttggaagcatccgacacgcgggagcgattttcttaggacgatacagcgctgaaccggtcggcgattattttgccggaccgaatcacgttttgccgacaaacggaacggcgcggttttcaagcccgttgaatgtaacagattttcaaaagaaatcgagcatcatctcatacagccggaaggcttttgaaacacacgcggacagcatttccgccttcgcgagactggaagggcttgaagcgcacgcaagatcgattgaagcgagaaacggaggaatgaccgatgagaaaagcggaacgcgccagaacaacaaatgagacggatattaagctggctttcgaaatagacggagaaggaaaagccgacatcagcacggatgtgccgtttatgactcatatgcttgatttgttcacaaagcacgggcaattcaatttaactgttgacgcaaaaggcgatacggagatagatgatcaccatacgactgaagatatcggcatctgtttagggcaggcttttttggaggcgctcggtgataaaaaagggatcaaacggtacggatcagcgcttgtgccgatggacgaagcgctcgcccaagtcgccgtagacctgagcaaccggccgcaccttgagatgcgcgctgcatttccgcaagcgaaagtcggaacgtttgataccgagctggtacatgaattcctatggaaactggcgctggaagcgagaatgaatctgcacgtcatcgttcattacggcacgaatactcatcatatgatagaagccgtgtttaaggcgcttggcagagcgcttgatgaagcgtcatccattgatccgcgcgtcaagggtgtgccgtctacgaaaggaatgctgtaaatgatcggtgtaattgattacggcatgggcaatttattcagcgtatcgaaggcgctggaacgcgtcggcgtcccgtatgtcgtatcagaccggccggaagagcttgaaaaagcggatgcttttattcttcccggtgtcggatcattcagtgatgccatggacaatttacgcagcacaaagcttgatcaattcatacaccgtatggttgacgagggtaagctgctcctcggcatctgcctcggcatgcagctcattttcgaggaaagcaccgaaaacggctctgcaaaaggacttggtttattagccggaaaagctgtgagactcaaagacagagatgccgaaggaaacaagctgaaggtgccgcatatgggctggaaccggctgacgtttcaccaaacgtctcctttgctttcggaagcggaagaaggcttcgtttactttgtccattcctattatatagacgggatggaagacggcgatcttctggcaagcgctgagtacggcgttcgtgttccggcggtcgtcgggaaacgcaatgtcttcggtgcacagtttcacccggaaaaaagcggtacggccggaatggcgattttaacgcaatttacaaaaatggcagcggaacagaaggtgaagaaatgaacgcttttacattatatccggcaatcgatatgagaaacggcaaatgcgtccgcctcatccaaggcgattacggcaaggaaacgatatacggtgactctcctttagacatggcggcgcaatttgcacaagaaggtgccgagtggattcatctcgtggatcttgacggcgcgaaagcaggcaggaaagtaaacgacaggcatgttcttgacattgcgcggcagcttgatatcaaagtcgagatcggcggcgggatccgttctgaagcggatgtgtacggttatttatcacaaggtgttgatcgtgtcattctcggcagctcggccgtatccgatccggcattcgtgaggagcatgctgaaacaatacggcggcaaaatcgcgatcggccttgatgcaaggaacggatatgtctccacggaaggctggctggaaacatcctcggtaagggcggccgatctgggccgtgaattggcggccgaaggagcggaaaccttcattttcacggatattgcaactgacggcatgctgtcaggaccgaacatcgaaagcaccgttcagctcgcaaaagcaacgggaaaaaacgtcatcgcttcaggcggagtcagctcagtcgccgatctcaaagcactggcccgcttcaaagacgccggcgtatcgggagcgattatcggaaaagcgctgtatacaaaacaattttcattggctgaagcgctcagcggggtgaaggacgcatgatcacgaaacgaatcattccgtgtctcgatgtgaaagaaggacgcgtcgtcaaaggcattcaatttctcgggctgaaagatgcgggcgatcctgtcgagctggccgaagcttacgacagggagggcgctgacgaacttgtttttctcgacatttccgcctctcacgaaggccgcaagacgatgacagacgtcgtagaacaggttgcggcaaaactggcgattccgtttacggtcggcggcgggatcaatcaattaagcgatatgaaacgaatgcttcgcgccggcgctgataaagtatccgttaatacagcggccgtcctccgccccgagctgattacggaaggagcggattttttcggctcgcaatgcatcgtcgcggcgattgacgcaaagtatgacgaagattcggattgctataaagtgtacacacacggcggcagaaagaaaaccgagtgggaagtcacggcctgggcaaaagaagccgtcagccggggagcgggtgaaatcctgctgacaagcatggacgcagacggtgagaaaacaggctttaatcatacgctcacacagcttgtcacacgtgccgtcccggtgcccgtcattgcgtcagggggagccggcagcgcgctccatatgcttgaagccttcacgatcggtgaagcggacgccgcgcttgcagcttccattttccattacaaagagacatctataaaagaagtgaaagattatatgaagaaacacggggtgaatgtgagatgaaacgggcagatgaactgcggtttgacgaggccggactgattcccgccatcgtacaggatgcggcaagcaaagaagtgctgacactggcttatatgaatcgtgaatcctacgaaaaaacgatagaaacgaaagaaacctggttttacagccgttcacgcggggagctgtggcataaaggagcgacatcagggaatacccaaaaggtgaaagccatccgttatgactgcgatcaagatgccctcatcgtgcttgcggagccctcaggacccgcctgccataagggaagttacagctgcttttctccggaaaaagcggacgcgcaggatcgtttcggcatcttaaacgaactggaaagcgtaatcgccaaacggcaggcggagatgcctgacggagcctacacaacgtatctgtttcgggaaggcgtcgataaaatcctcaaaaaagtcggcgaagaagccgcagaggttattatcgccgcgaaaaaccgcgaccatgaagaattaaaatgggaagcggcggatttgctgtatcatttgctcgttcttctgcgtgagcagtcgcttcctttggacgacgtgcttgacgtccttgcgaaacgccattcagcatctgagtaaaacaaacctcacggagagatccgtgaggtttttaatctgtcaaacttaaacattcaattaaatatttcttatttccgcaaccggaggcagatgaatttgataatattgactaatagagtttattttggtttttatcaaaaatatacgttttgttcatattccgttcatgcacatccgttatagtataaacagtgatataggaggaaaacatatgccgaataaacaaccaaaacctaaagggaaattcagttcattcttttcattagtcaaaaaaacaaaaccatcatacggtatgctggccttcgcgctgtctctcagtattgtgacaacgctcgtcagcctgctgattccgctgttgacaaaacagctcgttgacggcttttccatgtcgtcgctgtcaggcgtgcaaatcggaatcatcgcagccgtgtttatcgtacaggccgcattaagcgcctacgccacctatgccctgaactacagcggccagaaaatcatctcgggactgcgtgatttattgtggcagaaattaattaaactgcccgtctcttattttgacaaaaacgccacaggagaaacgatcagccgtgtcaccaatgacacaatggtggtaaaagagctgatcacaaacaatatcagcggatttattaccggaatcatttccgttatcgggtcactgacgatcttatttttcatgaactggaagctcacattgctcgtgctgatcgtcgtgccgctggctgcggtgattttagtgccgatcggccggaaaatgtttaaaatttctcgggaaacacaggatgaaacggcgaaattcaccggattattaaaccacatcctcccggaaatcaggcttgtaaaagcgtcaaacgctgaagaagcggaatacggacgcggaaaagcaggcatcatggcgctctttaaactcgggctgcgtgaagcgaaggtgcagtcgctcgtaggcccgcttattacacttgtattaatggcggcgctggtcgctgtcatcgggtacggcgggatgcaggtgtcatccggtgaattgacagccggcgcactcgttgcctttatcctgtatttgtttcagatcattatgccgatgggccagatcacttcatttttcacacagcttcaaaaatccatcggcgcaacggaacggatgattcatattcttgcagaaaaagaagaagatatccaaaccggaaaagccattgaaaacgcggatcagccgattaagcttgaacaagtctcattcggctacaaaacagatcaaaccatcttaaaagacattacggctacgattgaggccggcaaagtcaccgcgatcgtcggaccgagcggcggcggaaaaacaacgttatttaagctgcttgaacgattctacaatccgactgcgggcagcatcctgctcggaaatgaaccgattgatgcgtattcccttgagtcatggcgggagcatatcggctacgtgtcgcaagaaagcccgttaatgtcaggcaccatccgcgacaatatctgctacggattaaaacgcgaagtgacagatgaggaactgaggcaagcggccgacatggcctacgccctgcaatttattgaagacttaccgaagaaatttgaaaccgaggtcggtgagcggggaattatgctgtcaggcggacagcgccagcgcatcgccattgccagagcgctccttcgcaacccgagcattctgatgcttgatgaagcgacatcaagtctggacagccaatctgaaaaatgggtgcagcaggcgctcgaagtcttaatgaaagggcgcaccacgattgtgattgcccaccgtttatccacggttgtggatgcagatcagcttctctttgtcgaacagggtgaaatcaccggacggggcacacaccatgaattaatggcatcccattcgctgtaccgcgattttgcagagcagcagctgaagctgaatgccgacttagaaaacaaagctgtgtaaagcaagactttatgaataaaaagcagctgaaaaagctgctttttattttgcagccggagtcctgttcatacgggtgtacggtcggtaacgatgaagagccaagccataagcgtgtatgccggtacaggagacaatgaaaaaattcggtttatagacatcatgtcgattcatgaaaagaaaaaagcagaaggagggattttcatggctgtcatattggttgcggatgacgaccgccatatccgtgagcttgtccgccttatgatggagcagagcggttttgacgtcgcagaagcggaagacggggaagcggcggtgcggctgatcgaatcagtacctatagacctcatcatactggatgtgatgatgccgaaaatggacgggtttgaagtcagcgaagccgtccgcagctttacggacattccgattttgatgctgacggcaaaaggcgaaacgctggacaaagtgcaaggttttacttccggagcggatgattatctcgtcaaaccatttgagccgctcgagctggaagcaagggtcaaagcattgctgaaacggtaccggatcaccgctgaaaaactgctgaccatcggaacggtcacattagataagcaatcccgcaccgtaacgcgcggcggcggagcgggattaacattgccccggcgtgaatttgagcttttatttaagctcgccggttatccgaataagacgttttcaagagaacaattaatagaagatatttggggctttgattatgaaggtgacgagcggacggttgatgtgcatgttaaaaggctgagggaacgatttccggaaaaggactatccgtttgccatccatacggtgcgggggctcgggtatcggtttgtggtgacagaatgaaacggatcttcagaacggctggaaaaatcatcatccttctcaccgtcaccgcattcttatggctggcggctcacctgatcgttcagggtttcggtctcatatggccgattttgcttgttccgtacgccgagcagattctgacgctttggcttgttttcggcctgctgtttgtaacgatgtttattttttcaaagtcagcacgtgaaaggcatcatgcgatctgggattcgctgaccgccacgattaagcaaatgtcgagcggcaacttcacagcggccgcttcccggaaaatggagaagattgagcggaaccaccccgtgacgaaattagctgatgaactgtcgacactcgccgcggaactgagtgaaatggaaaaactgaaacaagaatttatttcgaacgtttcccatgaaatccaaaccccgctcacttcattaaagggctacgcacatcttctgaaaaaaccggatttatcatatgaggagcgggggcgctacttacacatcatcgagacagaaacagaacgattatcaaaaatcagtgaaaatctgctgaagctcactgcgctcgaacgccaaaccgaaccgatacaaaaaaaaccgttccgcattgacaaacagctgcggcgcaccatattgacctgtgagcctgaatggtccgccaaacagattgagtttctcattgatttacaggagtcgtatgtgtacggagatgaagcactgctcagccaagtatggatgaatctgattcacaatgccgtgaaatttaccggtgaaggcggccgcatttccgttaaaattgcagatctgccgggagcggcggctgtcgaaatcgccgacgacggaatcggaatggagcctgaacaggcggagcgtgtatttgaacggttttataaagcggacaaggcgagaaacgcagggggaagcgggctcggcctgtccatcgcccaaaaaatcgcagagctgcacggcggttcgatagaggttgagagcaaacgcggcgaaggaacccttttccgtgtcattcttccagccgagcctcgtgaaaaaaacagctaaaatctggtcgaaccagccagtaaaaaacgaagccgatcctgtcttttgaactattgaggtgaaaccgttttatggtatactactgacggtaatacgtataaaacggaggatatttgtgggaaaacacacttctgaacagaaaaagcacgcgcaaattgtccagctgcttcaggatggacaatatttttttcataaaggcttaaaagcatataaagagcggaatttaaagcgggccagcaaactgattcagcgggccgtccacctcgagccgaatgattccgaaatgctgtcccggctggccgtcatttattctgaaatgggccactaccagcagtcaaatgagctgttcgactttattttggtgaacctgaaagaagaaatgcccgagtgtcattactttaaagcgaataatttcgcgcatttgggactctttcaggaagcatacaaagaagcggcggcttattcagatgccgatccggacggggaattcagcgaagagattgaaaatctgatggagcttttggatttcggtgaagcgggtgaagacgaatcgctctacgaccaggatgagctgctgatcaggcaggaccgggcaaaaacgcttcttgagagcggccagcttcatgaagcggttgtcatgcttgaagagattacggccgattaccccgagctttggtctgcatacaacaatctggcgctcgcttacttttactcaggcaatgtcacaaaagcgaaacaaacggtattcgaagtgcttgagaaaaatgaaggcaatctccatgccctgtgcaacctccttgtattctgctattacgagagagaagatgaaaaagtcggagaattgagcggaaaactcgccaacgtgtatccgattttattcgaacagcgctataagctgggagcgacgcttgcgcttgtcggcagacatgatctcggttataaatggctccgttctctttacaaaagcgggttcgaaggcgacgacacgttttattattggctggccgcctcagcctacgggacaggccgcacagaatttgcggaaaccatttggaaaaaggccgaagccgaatttcccgaatcagaccggcccgcgccttgggcggagcggcaggaaccgctgcctgcttcacttgaacagcggcttgccgcctattatatcagcagcgctgaaggagagcgggaccagcttgaaaaagttctgacggcaaaacgcgccgtttcaccgtttgaacaagatttcgtcagactgctgctttccggtgaaaaaggcgcttctggcgtctccggtgatgcggtgttcacgtatcggacggtcaagcttctggagaaagcggaagccgacagtttaaaaactgacgtcatgagctgctgggtttttcacgtcattcagcacatccgcgccgccgctgccgtacagaatgagcgggcatgggcagcagccatcgcatatgtatggaaagaagcaaacggcgaaaaaacgacgaaaaaagaaacagcagccgtttacggtataacgccggcaaccctttcgaaatacatcagacaaatagacgatattttagaataaaaccgattctttctatataaagagtcggttctttttttatcagaaaagggcaaaacagaactttaccgccgaaaaaagaggtattcatacgtatttttttgcttttcgaatcgaaatcaggccgtaatcaccgtttattttgcaaaatatgagatttgcaatcacattgaaatataactgtaataaaaattgtcgaaacatgatggtataatgagtctcgtacataagagattagtttattttacatgtgctgtataatctataccaatttaaaagatttaaagattcatacataaaaatcatcagcctcacgggtatgtgagggagcgtaactttgatgttcataatagaattccaaatgagaacaggtttaaagtaaaagggaggaaagaaaaagtgaaaaagagtttattaacacttggtttggcttccgtcatcgggacaagcagttttttgatcccgtttacaaaaactgcatcggcggaaacattagacagcaaaaaagcaaaaatcgaaagcaagcaatctgaggtggcttcaagccttgaagcaaaagaaagagaattgtctaagcttcaggacaagcaggctaagattgaaaaagaactgaaagacattaacgctaaagcgttggatacaagcaataaaatcgaagataaaaaagctgaaaacgaaaaaacgaaaaagcagatcgctgatttgaaaaaagaaatcaaagaaacagaagcgcgtattgaaaaacgcaatgaaatcctgaaaaaacgcgttcgttctttacaggaaaacggcggttctcaaggatacatagatgttcttttaggggcgacaagcttcggagacttcatttcccgtgcgactgcggtatcttctatcgttgatgcggataaagacctgatcaaacagcaggagcaggataaagcgaaactcgaagatgcagaagctgaacttaacgtgaagctgaaaaaagttcaagatgatcttgcgaaactcgagtctatgcaaaaagacctgaacaaacagcttgatcagaaagacaagcttttcgacgaagcgaaaaacggccagaaaaaagcggcttccgctatctctgatctgaaaaaagaagcatcaaagcttgcaaacgaaaaagctgacactgaaaaagaacagaagcgtattaaagctgagcaggctgcagcagctgccctgatcaaaaaacaggaagaagcgcaaaaagcttctgaagaccaaaaccaaaaagatgacagccagccggcaccggcggttaaaactgtgaaaaaagcggctgtttcaacatcatctgatgacagctcaagcaaaccgaagagcacttcaggcggatcatctcataacagcggcggttcagatgattctgacggcggatctgttatttcaaattcaggcggtattgaaggcgcgatcagcgtaggatcaagccttgtgggtcaatccccgtacaagttcggcggcggacgcactcaatctgatattaacaaccgtatttttgactgctcttcattcgtacgctgggcttatgctaacgcaggcgttaacctcggacctgcaagcggcacaaacacagatacattaatcggaagaggtaaagcagtaagcgcgtctgacatgaaacgcggagacttagtattcttcaatacgtataaaacaaacggccacgtcggcatctacttaggtaacggaacgttcctgaacgataatacatcacacggtgtatccattgattctatgagcaacccttactggaagaaagcattcaacggcaatgtaagacgtgtcgtgcaataatgaataagacaagggccttctatcccggaaggctctttctttatttgtatacccgctcaggagctgcctaatcacggtttttcagaaaaatgagcaaaaaaatagcgaattgctctcagatttaataggatatgggtaaggaatacgattgatggggattcttagtcatatagggtgcgccccatttcgaaaaggagtgaatcatggtgtcagaagaaaaaatttatgatgtgatcattatcggcgcgggtccggcggggatgaccgctgctgtttacacatcacgagcgaacttatccacattaatgatcgaaagaggaattccgggcggccagatggccaacacggaggatgttgaaaactatccgggttttgaaagcattctcggccctgaactttctaataaaatgtttgaacatgcgaaaaaattcggtgcggaatatgcgtacggcgatatcaaagaaatcgttgacggcaaagaatataaaacggtcaaagccggttcaaaagaatataaagcgcgcgccatcgtcatttctgccggagcggaatacaaaaagatcggcgttcccggcgaaaaagaactgggcggccgcggcgtatcgtactgcgcggtttgtgacggcgcgttctttaaaaataaagagcttgtcgttgtcggcggcggagactccgccgttgaagaaggcgtctatctgacacgcttcgcttcaaaagtcaccatcgttcacagacgtgacaaattgcgggcgcaaagcattcttcaggcgcgtgcctttgacaatgagaaaattgacttcaaatggaacaaaaccgtaaaagaaatccatgaggaaaacggaaaagtcggcagacttactcttgtggataccgtgacgggagaagaggaagaattcaaagctgacggcgtctttatttatatcggtatgcttccgctttctaaaccgttcgaaaacttgggcatcacaaatgaagaaggctacattgaaacaaacgctcaaatggagacaaaagttccaggcattttcgccgcgggagacatccgtgaaaaaacgctccgccagatcgtaacggcgacaggcgacggaagtattgcggctcaaagcgttcagcattatgtggaagagcttgaggaaacgctcaaaaccgttaaataatcactgtaatgttcagtttttgaatcgttactgtgttttaattacgctgtaacacgggtgaaatactgatgttttaagatgaatgtagtaattgaccccctttttaatgaatacactttggcacggattccagtatccgtgccctttttttgcgattttctgttttctgtcaaataaaagaaaaggatgtcggtgtctctgcattgtgagagacatgccgaaacggtataatgaagagacgatgatttgttgagaaggttaggtgacgtacttgtgcaaagagtgacaaattgtgtgctgcagacagatgatcaggttctccttctccaaaagccgagacggggctggtgggtcgcgcctggcgggaagatggaaagcggcgagtccgtcagagattccgtcatcagagagtacagagaagagacgggcatttatatactaaatccgcagttaaaaggcgtatttacctttattattaaggaacaggaacaaatcgtgtcagagtggatgatgtttactttcgtcgccgactcctacacggggcggaatgtcgctgaatcagaggaaggcgttctgaagtggcatgacgtaaaagatatccacagccttccgatggcccccggagacgggcatatccttgattttatgatcaagggccaagggcttttgcacggcacctttacgtatacgccggacttcgagctgctcagctatcgtttagatccgcagtttattaaataaaagaaagaccgcaggggggagaaagatgagtatgaatgaaaaccatgatattcagctcgtcatcattacgggaatgtctggagcggggaaaaccgtcgccattcaaagctttgaggatctcggctatttttgcgtcgacaatctgccgccttccttgctgccgaaatttttggagctgatgaaagaatcaagttcaaaaatgagcaaggtcgcgcttgtcatggatctgcggggacgtgaattttttgacaggctgattgaggcgctggatgaaatggcggaaaatccgtggattacaccgcgcattctctttttagacgctaaggattccatccttgtgacgagatacaaagaaacgaggcgttctcacccgctggccgctaccgggcttcctctcgaaggaatcgcgctggaacgccagctgcttgaagaattgaaagggcgctctcagctgatctatgacacatcggatatgaaaccgcgtgatctgcgtgaaaaaatcgtggcgcatttcgccacgaaccaaggtgaaacatttacagtgaacgtaatgtcattcgggttcaaatacgggcttccgatagatgccgacctcgtgtttgatgtaaggtttctgccgaatccgttctacattgaaagcatgaggccgcttacggggaaagatgaggaagtgtcatcctatgtgatgaagtggaacgaaacacaaaagtttattgaaaagcttgttgatctgctcggctttatgcttccgtcttataagcgggaaggtaaaagccagcttgtcatcgcgatcggctgtacgggcggccagcaccgctccgtcacgctcgctgagtatttggctgactattttaaaaaagatttctatactcatgtcactcaccgggacattgaaaagagaagccggaaatgaataagaagccgaaaatcgcaatcttcggcggcggaacgggtctgtccgtgctgcttcgggggttaaagcataagcccgttgatattacggcgattgtgacagttgctgatgacggcggaagttcaggccgtctgcgggatgaacttcaaattccgccgccgggtgacattcgtaacgtactggccgctttgtcagatgttgagccgctcgttgaaaatctgtttcagcaccgtttcaacaaaggaagcgacttaaccggacattcgctcggcaatttgattttggcagcgatgacaaatataaccggtgatttctttcacgctgtcaccgaaatgagcaaggtgctgaatgtccgcggcagagtgctgccggctgccaacaccagtgtcgttcttcacgctgaaatggaggacgggcaggtcgtctccggagaatcgacaatcccttcttacggccagcggattaaacgggtgtttcttacgcctgaaaaaattgatccgctcccggaaacgattgacgtcatccgtcaggccgatttaatcattatcggtccgggaagcctgtacacaagcattcttccgaatctgctcgtaccgaaaatcggagaggaagtcgtcaaggctgcggccaaaaaagtatatatatgcaacgtcatgacacagcccggagagacgctgcaatacagtgcggccgaccatgtcaaggcgctgaacgatcatatggagcagccgtttatcgacacgatcttaatcaacaatgaggagatccctgacgaaatcaaaaacaaatatgcgaaagagctggcccggcccgtcgacttcaatgttgaaaagctgaaatccatggggcttgaggtcatcagggatcagattatcacgtataaaaatggcgtaatccgtcacgatacacataaagtggcttctcttcttgtcgatttattaagggactagaggccttttgaaatgaggtggctaatatgtcatttgcatcggaaacaaaaaaagaactgacgaatctggaagtgaaggactgctgcgccaaggcggagctgtccgcgctgattcggatgaacggttccctgtcattttcaaaccgccatctcgtgcttgacgttcaaaccgaaaatgcggcgattgcccgccgcatttatacattgctgaagaaacaatatgatgtatcggtcgaactgttagtcagaaaaaaaatgcggctgaaaaaaaacaatgtttatattgtgcgcttttctgaaaatgcaaagctgattttagaggaattgaaaatcctcggggagaactttatatttgaacggaatatttctgaggaactggtggcgaaacggtgctgcaaacgttcttatatgagaggggcgtttttggcgggggggtctgtgaataatcccgaaacatcgtcgtaccacttggaaatcttctcgctttataaggaacataacgattcattatgcgcgctgctgaatgaatttcatctgaacagcaaaacgcttgaacggaaaaaaggctatattacgtatttaaaagaggcggaaaaaatcactgaatttctgaatgtcatcggcgctcacaattcactgctgcgttttgaagatgtgcggattgtcagagatatgagaaactcagtgaaccgcctcgtcaattgtgaaacagcaaacttaaacaaaaccatcggggcttcgctcagacaggtggaaaatattaaatacattgatgaacggatcggtcttgaagcgctgccggaaaagcttcgcgaaattgcgcagctgcggattgattatcaggaggtcacgctgaaagaactgggggaaatggttgcaagcgggaaaatcagcaaatccggcatcaatcacaggctgagaaagctcgatgaaatcgcagaacagctgcgtacaggacaaagcatcactttgaaataaccgtacagaaaaggggagatcttatggttcaggggaaagtggaagtgcgtttaaagacgggattgcaggcgcgccccgctgcattgtttgtacaggaggcaaatcgttttgcatcagatgtgtttcttgagaaaaacggcaagaaagtgaatgccaaaagcattatgggattaatgagtctggctgtcagcacggggacggaagtcactctgatcgctgaaggcgatgatgaaaaggaagcgctggaaaagttgtccgcttatgtgcaggaagaagtgtaaacactttgtaagggggacggaacgatgaatgagtttctgaaagattgttatcaaacgataggctgggaaaaggattccctcgatttcagcaacctgccggagtttttaaaggcgctcgcgtatcggtttccgtttgaaaatcgcgcggttttgtccaaaaaagaatatgacgtcacgaaagaaggactgtggcggcacatggtgaaggaacctcatggcggcctttgctatgacttgaacggactgctttatttcatcctgaaagatgccggattggatgtcaaattgatccgcggaacggtctggaaaaacggctgggcgctgcccggcacacatgcggccgtacttctttccgccggggagaatgagtacatcgctgatgcaggcttcggcctcaatctcgccatgcagcctgtgccgatgtcgggagacgagacggtatcagcggccggagcgttccgcgtgaggatagaagagacggaattcggaacatacctgcttgaaatgaacaaaggggacggctggcagacaggttacgcattttcgcttgaagaaatcgatgaaaaggacctcaagtctatgaaacaaacaatctttgaacatgaacgctctcctttcaacaaacgcctgcttgcttctaagcggacaccggaaggccacatggttctgtctgaacgcaatataacaataaaaaaacacgatggcacggcggaaaacagcagaatagaccggtcagagtttgaagaaaaatttactgctcattttatatgaagctcgcaggttctctgcaaaaaaaaacggcctccgcagggaagccgttttttgtatatgtttatctcatttttgtaaaggttttataatgatctgtcgtcttataaatcagccagtcgcttgagtaaagaatccggtctgaatttctgaagcctgatgtatagttaatatccgcttcacgccacgtccgtccgcttttggcagggagtttgccttccctgtttgagaagatgtctccgccgatgcttttccccggagcgacgtctgcaagattcccctttgatgcaacccagccgagggcctgcgcttctgactttgtaatgtaattatcaggaagcttatgataggtctgaagataatccgcaaccccgtcaaacgtgttgataacctgtgcttcagtgtgcgccttgtgagaagatgtatccgtcttggcagccgtggaaaacagcatccccgccgcggagaacagcaccagcaaacaaacggaaatccacgataatcgttttttcaaagcaatacctcccatttttatcatgtgaagctgattccttttcattgtatcagcatcgagagaaaggaatagaaagaatttaaaaatagtacttttgatctagcgaaaaataaaccccggctgaaaggccgggatttttcatctcattgaaattccttcgtgaggtttttcggcgtttttccgtatacggcgtcaatcatgttttgtgcggcttgcttgaacatattcaagcggatttttgccgttgctgacccaatatgcggaagcaatgtgacgttttccagctgcaggagcggattgtcttcggcgatcggctctttttcaaacacatctaaaccggcgccttttatccagccctcctgcaatgcgcggatgagcgctttctcatcaaccgtctttccccgggaaatattgacgaaatatgccgtatctttcatcaatttaaattcccgctctcccatcatatgatacgtttcgtcagtaagcggcgtaattaaaagcacaaagtctgatgttttcagcagtgtatctaagtcgccatatgtaaccccgagttccttctcagcatccggttttctgctgcggttataatacagcacgtccatatcgaagccgaattttgcccgtttggcagcttgttcaccgattctgcccatgccgataattcctaatgtctgatggtggacatccataccgaaaagagattcttcctcaacggttccccatttgccggcgcggacgaatcgatccaattcggcaacccgtctggcggaagacaggattaatgaaaaagccagatcagcgacagtgtcatctaaggtgtacggcgtatgcgtgccgacaaccccgcgtcttttcatttcttcaatattaaaattatcatagccgactgaattattgctgacgaccttcagcttcggcgcgtgatccagcaaatcactgtcaatcgccgttccggatgtcagcagcccttcagcatctttcattttttcgtacagttcctcttttggaatggtatcttctttccagatgtcatatcggcaatgctcgcctatcatttgttcgacttccggcggtatcggtttcgcgatgaatacatagggtttcaacgggcttctcctcctttgtctttcttctctattttattatataagagaagcggtaacgtgagaaatattcaaacgcattacgataaatttctggttcttttgaacttaaaatgaaagaaaaagaaatgtacatgcttgatttctccaaacaataacagaatccgcctatatttctgaaggcaaaatgagcggaaccgctgttttcaaaagctttataggttggtgtaaagataaattttattatttttgaaagatataaatgaacataatctgaatttacagtcaaattatcgtgtcttttgttgaaagcgcttttgaggcctttttctgtgctataattccttactgtaagctgggtaagaaggcttgcaatacaatcggatgggagatgaatagaaaaatggtttctttatcaagcattttggagcacaaccagcagtttgtccaagaaaggaaatatgaaccttaccaaacgacaaaattcccgaaaaaaaagcttgtcatcgtatcctgtatggatacaaggctgacggagcttctgccgcaggcgatgggactcagaaacggcgatgccaaaatcataaaaaacgcgggagccattgtttctcacccatttggaagtgtgatgaggagcattttggttgccgtttatgaactgcaggcagaggaagtctgcatcataggtcaccgcgagtgcggaatgtcgggattgaatgcggcttccatattaaataaagcaaaagagcgcggcgttgaggacaaatgtctcagccttctgcagcatgcgggagtcgatttggaaacatggctgaccggttttcacagcgtcgaagaaagcgtggctcacagcgtgaatatggtcaggcatcatccgctcttgcctgaagaggtgccggtgcacgggctggtgatcgatccggggacggggacgctggatgttgtcgttgacggttatgaaacagtcaaaggaggatgcagctgacgatgcaatttaccggcagatatcagggatacaatttgcagaaatttcagaaagacctaatcgcaggaattgtggtcggaattgtagcgattccattgggaatggcctttgccatcgcttcgggggtcggtccggaatacgggctttacaccgttattgtggccggaattctgatttcgctgttgggcggctctaaatatcagatcggcgggcctacgggggcgtttgttcccattttatttgccattgtgatgcagtatggttttgagaatttacttgtagccggttttatggcaggcgtcatgctcgtcctgtttggcgtatttaagctcggaaagattatgaaattcgtgccgaagccggtgatcgtcggatttacggccggaatcgcggtgctgattttctcggagcagattgcccattttctcggtctgcgcgatattcaaaagcatgaaagctttatcctcaacattgcagaaatcggcaagaagctcggaacctttaatttgtacagcatcctcatcgcgggaattgctttggccattttgctgttatcagccaggctgatgccgaagattccgggcgcgcttgtggcgctgcttgtctctacagccgcggcggtggtgtttttccctgacaaaatggcgacaatcggttctgcttacggggaaatcccgcggcagcttccggctttccagcttccggatttctcaatcgataacatgatcatgatgtttccgtcggctctgatcattgcgcttctcggcggacttgagtccatattatcggcgatggtcgcggacaatatgaaaggatcacggcatgacagcaatagggagcttgtcgggcagggcatcgccaatatggcagcgccgcttttcggcggcataccggcaacgggagcgattgcgcggaccgcaacaaatattaaaaacggcgcagtttctccgatttccggtgttgtccacggagtcaccgtcctcctcgtcctgctcgtcttcgccccgcttgccgttcacgtaccgctggcaagcatggcgccggtattgatggttgtggcttggaacatgagtgagcggagggaagtcgccaatatgatgcggctgaaaaacactgattcattcgtactggcggcaacctttttactgacggttctgtttgatttaatcatcggcgtttctgccggtctcgtgctcgcttttgttttctttatcagaaaaatgagcgaatcaacaagcatcaaaacaccgcatgccgctgtcaaatcggttaaaaatgattcatccgtcagcacatattccattgaagggccgctgtttttcggttcaattgattcactggaatcatcgctgctggagaggcttcaggaaaagccgaagacgcttattctgctgatgaataatgtgcattacatggatacctccgcagaagcggtgctggggaatgtgatgaaccggatcaaacggcataacgggagattgatgatcgtcggattgcaatcacagccgagagagctgatccgaaagacggggctgtttcataaaatcgggaaacagcatttctttgagcatcaggacgagataacaggataaattcagatacggcctgtccatgaaaatgcggacaggccgtgtttttattcggtttcaaagcgcttgatcagtttttcctgatgggctttcatcgcatcttctaacgtgattccgtacttatcggcaaggatagccagatttccgaggacgtcacccatttcttcaatcagctcctgcctgcgttcagcctgggttgcgtccttttcatccggccggtctctgccgatttcatatgctcttaccgcccgggcgagctcacccgcctcttccattaaaaagccgattctgataaatggtccgtacgccgtccatcctcgtttttcataaaaatctttcgtccattgttctgcttcagccatctgcatgtgaaacactccttatgtcctgtatgattcttattgatattatcatatagagatgggacaatatatagtgtattttgatttattgatgtacatatatagatacggagatgaaaaaatgaaaaccatttgtgtatttgcggggtcaaacccgggggtaaatgaagagtacaaacgcaaagcggccgaactgggtgaatatatggcggagcagggaatcggccttgtttacggcggctcacgggtcggtctgatgggaaccgtcgccgacgcgttaatggcaggcggcggaaaagctgtcggcgtcatgccgagcgggctgttcagcggagaggttgttcatcagaatctgacggagctgattgaagtcagcggcatgcatgagcggaaagcgaaaatgagtgaacttgccgacgggtacattgccatgcccggcggcttcggaacatatgaagagttatttgaagtgctgtgctgggcgcaaatcggcattcatcaaaaaccgatcggactgtacaatgtgaacgggtattttgagccaatgatgaagatggtcaagtacagcattcaggaaggattttcgaatgagtctcatttaaaactgatacacagttcctcccggccggatgagctgattgagcagatgaacaattactcgtacccgatccttcagaaaaaatggacggaaatataaaaaagagccatctggcatgtgtgtgagtgccgggcggacttcattaaaatcgagtgtatttgacaatgtgagatttccttagggaaatctttttttatgtccagattaccatcgtagtataatttaactaattcggattggctatctaagcaaaagcggaaggagacggaaaatggcgacgttgtcagatgtggctaagagagcgaatgtttcgaaaatgacggtgtcacgtgtgattaatcaccctgatacggtaacagatgaactgaaaaagctcgttcattccgcaatgaaagagctgaattacatccctaattatgcggcaagagcgcttgtgcaaaacagaacacaggttgtcaaattgctgattcttgaggaaatggatacgaccgaaccctattacatgaacttgctgaccggaatcagccgggagctggatcgccatcattatgctttgcagcttgtgacaagaaattcactcaatatcgggcaatgcgacggcattattgccaccggcttaagaaaggccgattttgaatttgtcatcaaagcttttgaaaagccgttagtcgtatttggagaaaatgaaatgggctatgattttgtcgatgtgaataacgaaaaagggacttttatggcaacccgccaagtcatggggctgggggagcgtgaggttgtctttttcggcattgatttggatgagccattcgaacgctcaagagaacaggggtatattcgggcgatgaaagagagctgcagagaaacgaagctgtttcggatcgctaacagttcaaaaaaaagcgaaagcctggcaagagaagttttgaaaacgctcggccggcaagccgcgtttgtctgcgccaccgaccgaatcgcgctcggggtcattcgtgcggtgcagtcactcggaaaacgaattcccgaagatgtggccgttactggaaatgacggtgtttttcttgaccgcatttcctccccgcggctgactacggtcagacagccggttgtggaaatgggagaggcctgtgcgaaaatgctgctgaaaaaaatgaatgaaggcggcgcagctcaaggtcatttgttttttgaaccggagttaattgtgcgggaatcaactttgtgaaagcttgattctgttatcggtaacaagagaaaaacgattgcctctcccgatttcatcatgctaccttcaaagcataagccagcctataaaaagggggaaacatgatggaatatgccgcaatacaccatcagccgttcagtgctgatgcttattcttatgacgggcgaacggtgcatatcaaaatccggacgaaaaaaggtgatgctgatcagattcgattggtgtggggcgatccttatgaatacagcggcggcagatggtcggcagccgagcagccaatgagaaaaacagccgcaacccaaaaccatgattattggtttgctgaagtgtcgccgccattcaggcgtttgcaatatgcatttattgtctcagaccagcatgaaaacatctttttcggagcgtcaggggtctgtcctgtaaataaaaaaacgctggaaacgattcattattattttaagcttccgtttgttcatgaggcggatacatttcaagcgcctgaatgggcgaaatcaacggtttggtatcaaatttttccggaacgttttgcgaatggaagagaagacctgtcaccggaagctgcactgccttgggggagcaaggacccggacgttaatgatttttttggcggagatttgcaggggattattgacaagctcgactatttagaagaattaggggtgaacggaatttatttgactccgatcttctcctctccatccaaccataaatatgacacgctggattactattccatcgatccgcattttggggatcgggagcttttccggacattggtcagccggcttcatgagcggggaatgaaaattatgcttgatgctgtttttaatcatataggcagcgcttctccgcagtggcaggatgttgtaaaacacggggcccggtcccgctacaaagactggttccatattcactcttttcctgtgaaagaagacaattatgacaggtttgcgtttacgcctgatatgccgaagctgaatacggctaatccggaagtacaaaggtatttgtttgagattgctttgtactggattcgtgaatttgacattgacggctggcgtttagatgtggcaaatgaagtggatcacgctttttggaaggcattcaggcaggctgtaacggccgagaagcccgatctttatattttgggagagatatggcattcatcggaaccttggctcagaggagatgagtttcacgccgtgatgaattatcctttcacagagccgatgattgcttattttgctgaccgggagatttctgcttcatccatggcctatcgattaaacgcgcacttgatgaatgggatgcggcaggccaacgaggtgatgtttaatttactggacagccatgatacagaacgtcttctgacaaggtgcggaaatgatgagaaaacagcccgcgctctgctggcctttatgtttgcccagacaggagcgccctgcatctactacggaacggaaatcggtctggacggcgggagagatccattatgccggaagtgtatgatttgggaaaaggaaaagcaaaaccgggaaatgctcagctgtatgaaacgcttaatcaccttgcgcaaaaaagaaaacgctttattgacgtacgggagtcttgagtggcatctgcttgatgatcaaaacgattgtatcagtttttctagggttttcaatggcaggcaattgattttctattttaatcaggggaaccgggccggggaaatccgtttgcaagattttaatatggagagaagcagaaaagtttacgatgcgtggacggatcagatccttcaacatgatgatgctattactgttcagccgggagaatttttgattttgagcgctgacgcccctgtctgaattctgttatcggtaacaggctgaaaggctttgaaaccgctttctctaacagagtagaattgtaatagattcataataaaagggggaaaagatatggcggggttcgtcaaaaagggattggctttattgacggcatcagttttggcattctgtctcggcgcctgttcaaattcaaaggaatcggccggcgctgacggcaaaaaggtactgaccgtgtccgttgaagaaacctataaaaaatatattgaaagcattaaaggagagtttgaaaaagagaatcacgtcacaatcaacattgcagaaaagcaaatgttcgatcagctggaggcgcttcctttggacggcccggccggcaatgcgcctgacgttatgcttgccgcatatgaccggatcggcagtttggcgcagcaaggtcatttgcttgatctaaaacctgccgatacaaaaagctttggagataaagagatgcagcaggtaacgtttaacggaaaggtgtacggaatgccgctggtgattgagacgcttgttctgtattacaacaaagatcttataaaaaaagcgccggcaacatttaaagaccttgaagcattaacagaggatccccgcttttcatttgcttctgaaaaaggaaagtcaacgggatttttagcaaagtggactgacttttatatgtcgtacggtttgctatccggttacggcggatatgtattcgggaaaaacggcacagatcccggggatatcggcctgaacaataaaggggctgcagaagcggtgaaatatgcggagaaatggtttaaaacgtattggccaaaaggcatgcaggataactcaagcgcagacgattttattcagcaaatgtttttggataagaaagcggctgcaatcatcggcgggccttggtcggctgccaattttcaagaggccggcctgaactatggagccgctcctattccgacattgccaaacggaaaagaatatgctccgtttgcgggcggcaaaggctgggttgcttcaaaatatacaaaggaacccgagctggctgaaaaatggcttgagtatgctgcaaataatgacaatgcgttcgctttttatgaggatacaaatgaagttccggccaacacagccgcaaggaagaaagcgggggagcaaaaaaatgagctggcgtctgctgttattaaacaatatgagtcagcggcacctgcgccgaatattcctgaaatggccgaggtatggactggcgctgaaagtttaatgtttgatgcggcttcggggaaaaaaacagcaaaaaaatcggcggatgatgcggtaaacgtcataaaagaaaacatcaaagaaaagtatgtgaaataaaatcggaggggaagtgtccgtaagaatagagggcgaaaaatgaataaagatggtacacttttacaccaaaaacggaaggcgccatggtttttatcgatcattccgggaattggacagatcgcgaatcagcagatatcaaaggggatcttatttctggtcattacgagtttgtttgctgttgaattatgcgtcttcggtattgaggcgctgaccggattgattaccttgggaagtgttcccggtgaagatcactcactgtttatgctgattgaaggcacgctgcaattgatcttgacgctgatttttctcatgttctatatcttttcagtttatgatttccgtcataccgccgctatgaaagcggcgggtttgaaggtgaatacagcggccaaggatatcatccgccatgcgggagataaagggtttccttatttatttacactgccggcatatctcatgatggtgtttgtgattatttttcctgttctggtgactctgtttgttgctttaacaaactatgatttttatcatataccgcctaacagtctgattgactgggtcggctttaaaaatttcttgaatatcttttttgtcggttcttaccgggaaacatttgtgaatgtgctgggctggaccatgatatggacaatctgtgcaacaacgctgcaaatcattttggggatcgtgacggcacttttcgtgaaccaagattttattaaaggccgacggatattccgaatgattttcttatttccatgggctgttccggcctttatcacaattatgagcttttccaatatttttaatgacagtataggggcgatgaacacgcaggtgattccattaataaaccacctgccgtttgtggaactgccggcgatcgcgtggaagactgatgctttctggacgaagaccgctctgattatgattcagacctggcttggctttccttatatttatgtcatggtaacgggggtcttgcagtcgattccgggtgaattgtatgaagccgcaaagattgacggggcttcttttatgcagcgctttcgcaatattacattaccgatgattttatttgcgacagcaccggtgatgattacacaatacacatttaactttaataatttttcgatcatttatttgtttaatgaaggcggtccgggaagcgcgggagccggtgccgggtcgaccgatattttaatatcctggatctataaactgacaaccggcacttctccgcaatatgctgtggcagcggccgtgacattgttaatttctttcgtggtcattggaatttccctgattgcttttaaaaagtcaaatgctttcggtaatgaggaggtgatgtagatgggttccagaacggccggaatgcttacgaaaatctgcacctatttgtttttgctggttttaagcattgtcattttatatccgctgctgattacggcttcctccgctttccgtgctggaaatgtgacggcttttcagctcgatttctcaggtccctggacttttgatcattttaagcggctgtttgaagagacgctctatcttcattggtacagcaatacgctgattatcgcggtgtcagtcatggtattgcaggtcacgattgtaacgcttgccgggtatacgtacagccgctatcggtttgcggggcgaaaaaagagtcttgtcttctttttaatcattcaaatggtgcccacaatggcagcgctgactgctttttatgtattggccatgctgataggcgctcttgatcaatactggtttttgacagcgatctatatcggcggcggaattccgatgaacacgtggctgatgaaaggttattttgatacagttccgagagaaattgatgaggctgcgcgaatggatggagcggggcacttcaggatatttgcctccattgtgctgccgcttgtgaagccgatgcttgccgttcaagcgctttgggcgtttatggcgccgttcggggactatttactggcgaagtttttgcttcgctcgccggaaaggctgaccattgcagtaggattgcagtcgttcatttcaaatccgcagcagcaaaaagtcgccctgtttgcggcgggggctatacttgccgcactgccgatatgcatcttgttcttttttctccaaaagaactttgtatccgggctggcggcgggcggaacaaaggggtagttcaatgaagaatgtgcaaaatgaaagctttatgatccgcagtcttaaagcatcggtgtctccgtcaggtatttgccgttacgggaaaacattcagctggcttcagctttcctttctctttatgtttttgacgtcctgccttatggcgccgtttacgatgtcgtttttgaaaatggatcgcttcagcctcaaattggttatgcctgcggcgctttctgcagtgaatgatcgttttgccgaacaattaaacggtattcaaatcaggaacggaaaactgacaggcggacagcgttttgatcaaattgaagagggcaaacatctgctggcagtcgatatggagcatgaatggaaaccaaacggtgaaaatggacgtttgcgtgtaaaaggatatgacaacgcgatcatattccagcctgaccggctgattatgaccgaccaaaacggaatggggttttcagttcgctatgggaaagcggacgccaggcttacggacccgggcgtatatgagacggaggctgttatcgggcaattgtggctggcacagtataagccgatgatcatgatgctggggtgcgcagtgatttttttgatccagctgttttttacagctgtgcttgcgggaggcatctggatggcaaaattatcaaaaatgatcgatatcgcgtcatgtaaggaagcagcttctgcagcgatttgcgcatcggctctgcctgcattcgcggcagctgctatcgggctgatccgctttgatttgattactgtattaatggttcatacatgcggcgtcacgttgatgattgcttttttattcagatatatggccaaaacccgccgtcattatgaaaatgttcattcgggaggaagacatgataaatcagcggttgtttgagattgatgaatggaaaatcaaaaccaatacatttcaaaaagagtatatacggctgcaggaaagcctgacttctcttgccaacggctatatgggcatcagagggaatttcgaagaggggtattcaggcggcagccatcaaggcacatatattgcgggcgtgtggttccctgacaaaacgcgggtaggctggtggaaaaacgggtatccggactatttcggaaaagtgatcaatgcgatgaattttattggtatagatgtgtatgttgacggtgaaaaagtcgatctctatcaaaaccgactcgaatcatttgagttagagcttcatatgaaagaaggaattctgaggaggagcgctgttgtccgtattcaggataaaaccgtgcgaatcaaatcagaacgatttctcagcctggccgtaaaagagctatgtgcgattcattatgaagcggagtgtctgacaggggacgccgttattacgcttgtcccttatcttgatggcaatgttgtaaacgaagattcaaactatcaagagctgttttggcaggaaaaagagacaggagcggactaccgccgcggtcacataacggcaaaaacgctcgacaatccgttcggaacgccgcgtttcaccgtctccgccttaatggaaaatttgacagaaggctatgtcagtcaaagctttcaaacttccggcatgtatgctgaaaatcgcttcagctatcaaaacaaagcttcattgaaaaagtttattgttgtcacgacttcacgcgatgttcaagaagcagagcttacttcgaaaggggaggagcttttggcggctattcttaagcaaggttatgaagaagcgagacagcagcatattgccaagtggaaggaaagatgggcaaaagcggatatagagataaagggagatgaggaacttcagcaaggcattcgctacaatatctttcagttattctcgacatactacggggcagatgcccgtttgaacatcggaccgaaaggatttacaggcgaaaaatacggcggtgccgcctattgggacactgaggcgtatgccgttccgatgtatttggcgacagccgagccggaagtcacgaaaaacctgcttttgtaccgctatcaccatttggaggctgccaaacggaacgccgccaagctggggatgaagggggcgctttatccgatggtgacgtttaccggagatgaatgccacaatgagtgggagattacgtttgaagaaattcaccgcaacggcgcgatttgctatgcgatctgcaattatgtccaatatacaggcgaccgtaactatatggaacaatacgggatagacgttcttgtggcagtcagcaggttttgggccgaccgtgttcacttctcgaaacgaaaaaataagtatatgattcacggcgtcacagggccgaatgaatatgaaaacaatgtcaacaacaattggtatacgaatgtcattgcggcttggactttggattatactctacaaagtctcgaaagtatctcagcggagaaacgccgccttctggatgtgcaggaagaagaattgaaagtctggagagaaatcatccagcacatgtactatccgtatagtgaagaactgcaaattttcgttcagcatgacacatttttggacaaagacctgcaatcagttgacgaattagatccagctgaacggcctctttatcaaaattggtcatgggacaaaatcctccgctccagctttattaaacaagccgatgtgctgcaaggcatttatttatttcctgaccgtttctctatagacgaaaaacgccgcaactatgaattttatgaaccgatgacggttcatgaatcaagcttatcgccctccattcacgcggtgctcgctgccgaattgaggatggaaaaaaaggcgcttgaattatataagcgtacagcaaggcttgatctcgacaattacaatcgtgatacggaggaaggccttcacattacttcaatgacgggaagctggctggcgatcgtccaagggtttgccggtatgcgtactttaaaaggaacgctctcattcaccccatttttgccgaatgaatgggacggttactcgttccatatcaattatcaaaaccgcttgatcaaggtgacggtcgaagaaaggcgcgccatttttgagcttgtcaaaggcgaaccggtgtccatcacagtttatggagagccaatggtgctgaatgaacgatgtgaaaggagaatgcctgatgagtgagtggtggaaagaagctgtcgtgtatcaaatttatccgcgcagtttttatgattccaatggagatggatttggggatttacaaggcattatcaaaaagcttgattatatcaaaagacttggcgcggatgtgatctggctgtcgcccgtgtttgattctccgcaggatgacaacggctatgacatcagtgactacaaaaacatgtacgaaaaattcggaacaaatgaagatatgtttcagttaattgatgaagtgcatcagcgcggaatgaaaatcatcatggatctggtcgtgaaccacacgtcggatgagcatacctggtttgttgaaagccacaagtcgaaggataatccttaccggaactattatttttggaaagacccgaaaccggacggttctgagcctaataattggggatcgattttttcaggctcggcgtggacgttcgatgaagggacgggacagtattatttgcactacttttcgaaaaaacagcctgatttaaattgggaaaatgaagccgttcgccgggaagtgtatgatctgatgaagttctggatggataaaggcgttgacggctggcggatggatgtgatcggctccatttccaaacataccgattttccggactatgaaacagatgccagccgcccccatattgtcggccgttatcactctaacggcccccgtctgcatgaatttattcaagaaatgaacagggaagtgctttctcattacgactgcatgacagtcggagaggcaaacggttctgatattgaagaggcgaaaaaatatacggatgcaggcaggcaagagctgaatatgatctttacatttgaacatatggatatcgatacagaacaaaactcgccaaatgggaaatggcagatcaagccgtttgatgtgattgctttaaaacaaacgatgacaaggtggcagaccgggttgatgaatagcggctggaataccttgtattttgagaatcatgatcagccgcgggtgatttcccgctggggcaatgacggtgagctgcgaaaacagtgtgcgaaagcatttgcaacggttctccacgggatgaaaggaacgccgtttatttaccagggagaagaaatcggcatggtcaacagtgatatgccgctggagatgtatgacgatctcgagatcaaaaacgcataccgtgaactagtcatcgaaaacaagacgatgacgaaggaagacttccggaaagccgcggcgaagaaagggcgggatcacgcgaggacgccgatgcaatgggatgcaggaaaacatgccggattcacagccggagacccttggttagcgctcaattcccgctttcaagaaatcaatgtgaaagaatccctggaagatcaagattcaattttctattactatcagaagctcattcaattacgaaagcaatataagatcatggtatacggagattatcagctgctgctggaagatgatccgcaaatctattgttatatccgtaaatatcaagggaaaaagcttctcgtcgttgtgaatttatcggaagacaaggcccagttcgaagcgcctccggaactgattcatgagcgttggaaagtgctgatttcgaactatccggaggagcgggctgacttgaagcgtatcagcctcaaaccatatgaagctgtgatgggcatcagcatatgaaagcggttatttttgatttagacggagtgataacagatactgctgaatatcattttctcgcttggaaatatacggcggaacaaatcgatattccccttgacagaagtgtgaatgaaagcctgaaaggaatcagccgggaagcgtcacttgaaaggatccttatttttggcggagcggaaaaaaggtttacacatgcggagaaacaagaactgctgcatcaaaaaaaccaatattatcaaacgttgatcagcagattgacgccggaagatctcttgccgggaatcggcaggcttctttgtgaattaaaaaatgaaaatataaaaatcgggttagcatcttctagtcgcaatgcccgcgcgatcttaaaacgtttggcgattatcgatgattttcaagccattgttgacccggcggctcttgcgaaggggaagcctgatcccgaaatctttttaacagctgcagcgctgctcggtgtttccacggctgaatgcgcggcaatagaagatgctgaagcaggaatagctgcaatcaaatctgctgggatgttcgcggtcggtgtcgggcgtgaacagtcgatgcttggtgctgatctggttgtgaggcaaaccggtgaattgtcgtttgagctgttgaaggaagaatggaagcagtataggggaaaggttttaaaaagcaccagagagtgaaaaaaacctgcaagagacatcatctcttgcaggttttttgggcattacttctggtcttctgtattgcgtgtcagcactttatcgattaagccgtattctaaggcttcatcagctgatttgaagttgtcgcggtctgtatcgcgctcaatgacttcaagcggctggccggtacgttcagcaagcactttgtttaatttgtcgcgaagcaagagaatgcgttttgcagcgatttcaatttctgtcgcctgtccttgcgctccgccaagcggctggtgaatcataacttcactgttaggaagcgcgtaacgtttgcctttttctccggctgcaagtaaaaatgctcccatagaagcggccataccgatgcagatcgtggatactttcggtttaatgaactgcattgtatcatagattgccataccggcagtgattgatccgccagggctgttaatgtaaatggaaatatctttttcagggtcttccgcttcaaggaataaaagctgtgacacgatggagttcgcaacgttgtcatcaatcgcagatccaagcatgataatacggtccttcaaaagacgggagtaaatatcataagctctttctccgcggttcgtttgttcaatgactgtaggtattaaattcataatgctcctccttcaccttttaggtaagtatgtatttacatgatacatttttggtcaataaaggtcaaacaaaacgctgaccaaaatgccaaccttttcttctaacaccatttttcccataaaacaaaaagttcaaacagcaaagtggaaatgaggatgatcagcaccggcgcttgagaaaatgatatggcgggagcgctcaaaatagaccgcaatcgcgtcgctacgtactgaagggtctgactacgttgtccgcccttccaaaagccgtaccggcaaatacgtttccagcggcaaatcatcaaattcgccttcaatttcttttgctaaaatctcgatggctgttttggaaatcaattcaatcggctgctggatggttgccaagtccggcagaaccgattgaacggtttcagtgccgtcataaccgatcacttttaattgattcgggatgtctattccccgttttttggcctcggtcatcacggcagccgccatgatatcatcgctggcaaaaattccgtcggtgtcaggctgttcatcgaataatgttgaaataatgtcatggtaatgctgataaaagggtacttcatatgtaataggcttttgtccgtgttcatgcatgacgtcttcgtatgcttttcttctgaggtttgccggtgtctcgagttcaagcgggccgttgacatggacgatgtgccggcaccctttttcaatcagcagttctgccgccttttttccgccgttatagttgtctgagccgacgacgggaatcgtgtccgataagtaatgatcaatggcgacaatcggcagattttgcttgtgataattgagaattccccggttgtaagtcacggcgatcacgccgtccacttggtttcttatcagcatctccaaatatttttcttccttatcctttcgatgtaaactgttgcaaagcagcagtttgtagcccatggacgtacaaatgctttcaatatgaaaggcgagttcgccgaaaaacggattgctggagtttgggatgataagtcctattaaattggttcgttttcggaataaagagcgggccagatcgtttggaaagtaattgatttcttccatcgccttgtacactttttcttttgttttttcgctgatatagccgcggttatttaatacccgcgaaacggttgtggatgaaactcccgctattttcgcaacatcatgaatgttaggcttcattcccgtgccctcctgcttactgaaatggcttacaatttccgtcacgcacttattttagagaatcaggctgacatgtgcaaggacattccatgtttctgttttcatataaagagggtgcgttttgtttgattgaaataatcagaaaattgtatgtcaaccgattgacatatgaaaccggttgacatacaattctttttgaaagcgctttatttgcggagtgaagggaagtgacgggtatggagagatggctggcggcaataaagtgaaagaattaagcagcgatagaaagtaagcgcttactcggagctcgcatgtatgtgatgaaaatgaagaaggaagtatgcggctctaaaacggctattaaaaggtcctctaaaaggagcggtgcaaatgaaaagctcaaaaagtctgtattggaaactgagtgcttatttcttctttttcttttttacttggtcttccagctattctttatttgcgatttggttagggcaggaaatcaatttaaacggatcagcgacaggcattatcttttctgtaaacgccgtatttgccctgtgcatgcagcctctttacggttttatctctgacaaattggggctgaagaaaaagatattgtttatgatcagctgtcttctcatattcacgggtccgttttatatcttcgtctatgggccgcttttacaatacaacgtctttcttggcgccgttgtcggaggcttatatttgggagccgcttttttggcggggataggcgcgattgaaacgtacattgaaaaggtcagccgtaagtatgatttcgagtatggaaaatcaagaatgtggggctcgctgggctgggcggcggctgcattttttgcagggcagcttttcaatatcaatcccaatatcaacttctggatcgcgtctgtttcagccgtcatattaacggccattatcatgtctgtgaaaatagaaatgaccgatcatgagaaaaacagagcggattcggtccggttaaaagatgtggggcggctctttttactaagagatttctggttttttatgatgtacattatcggggtgacttgcatttacggtgtatatgatcagcagttcccgatctattatgcgtctttgtttccttcagtgtcgacgggtaaccaagtattcggctatctgaattcattccaggtgtttttggaggccggcatgatgtttcttgcgccttttatcgtcaataagttcggggcgaaaaacagtttgattttagcggggtttttaatggctttccgcatcgtcgggtccggaattgcagttgagcctgtaggcatttcatcaatgaaactcatccacgcactggaattgccgattatgctgatcgccgtttttaaatatttggctgccaattttgatacgcgtctgtcgtccgtcctttatctcgtcggttttcaattcgcatctcaggcaggcgcgtcgattctgtcgccgcttgcgggaggattatatgacagtgcggggttccgtcaaacctatctcatcatgggaatcgtcgtctttggttttaccgtcatctccatatttactttattgggcccgaaacaaaacagcaggcgtgtccagcgtctgcaaaaaatcggatagagaggatgttacaaatggatagaattcagcaggcggaagaagctttgaaggaagccgagggtaaagtgaaacaaagatatcgattggggtaccatattatgccccgggcgaattggatcaatgatccgaacgggcttattcagtttaaaggagaataccacgtcttttttcagcatcatccgtatgatgagcattgggggccgatgcattggggacatgtaaaaagtaaagatctcattcattgggagcacctgccggttgccttagctccgggggatgaattcgaccaaagcggctgtttttcgggaagcgcggtcgatgatcatggaagattggccctcatctatacaggccataatataattgatcaagagaaagacctattctatcaaactcaaaatatcgctgtcagccaagatggaaccgtgtttgaaaagcttcaggaaaaccccgttattgcggaaccgccggaagacagcgcccgtcatttccgcgatccgaaagtatggaagcatcgcgatgtttggtatatggtcatcggcaactcttcaaaagaaaacgtcggacgggtcgttttataccgttcacctgatttgcgtgattgggaatacgcgggggttctcgcccaaagtgacgggaatctcggctatatgtgggaatgtcctgatttctttgaattaggcggcaagcatgtcctgctgatttcgccccaggggatcgaggcggacggtgattcctatcaaaatttacatcaaaccggttatttaatcggtgactatcatgatgaaacaaacaaatttacacacggcgcttttaaagaactggatcacggccatgacttttacgccgtgcaaacattattagatgataaaggacgcagaattgctatcggctggatggatatgtgggaatctgagatgccgacaaaagcggacggatggtgcggtgcactgactttgccgcgagaactgactttgcgtgatgatcataaacttttgatgaatcccgtggaagaaaccaagcaactgcggaaaatagaatatcgggaatgtgccggacgatcgctttcagggagttacttggcaaagacgtcggaagacctgcttgaagtccgagtcgtgtttgatataaacgattctgatgccgaaacggcaggttttaagattcgcggccttgacgaagaagaacttgtgctgacatacaatctaacggataaaaagctgacacttgattgctccaagatggggaaagcgaaagacggtgtgagaagggtgcagacggatacaaacggcaagctggcactgcgtatctttattgacagatcctcgattgaagtattcgccaatcatggagaaacaacgatgacaagccgtatctatccgaatgaaggcagattggggattgagctgttttctgagaaaggcgccgtaaaggttgaggaattcacctattggacgttaaaggacatttggaaaagaagctgaaacgtgttttttctgaagtgactggaaatgtaccgatccgggggcagtccgcctgaaatgagttttttgtgaaaatcaatgccggtaaacgatgcaggattatgctgcatgaggacgctgcataatcctgttgtgtattatcaaaaaagagttgctttctgtgcgtttctttattataatataaaggtatctgattgaaaaaatgtgcgctcgtagctcagttggatagagcggtggtttccggtaccacgtctgtcgggggttcgaatccctccgagcgcgtctcagttaagacgatagaaaaaacctcgcagatgataaatctgcggggtttttttattttatcttgttttgaaactgttaacgaatgtgtctctgttatgttcggttccggcaatcagccgcgcactttcactgatccgctgtgcgagagctttttgcgccttaccttcaaagctgttcaatagtgctgaatacacttcatataattcatctttcaacgtatccatttcgaatgtcggtttcagcgttcggcgcactgtctccagttttgtccccgctgcctgtgtcatgacggttttcagcatctgccgctgtagccttttcttcatcgggtcgtccttgtgttctaaaagttcgtctaatgtcggcattatgtatccacctctatcatcttaaccagtttgcgagcatctggtctttttcctgaaattcatccgctattttatgtaagaatccgccaatctcttcaaggtccgtaatcgccgcctgcaaggaatcaataaacgcctgctcagcctgagtgtcataaaaaatcgggcctttatcgtaggattgcgcaatatcttcaatggtattggtcacgtcctgtgcttgaagctgatcaaacaagccgtgtccgacttggccgtaaaattctgttttcagctcggcgactttttcatcgtgctcctgataggcgttttgcgcttcttttttcatcgtccgcaaatcctcagtcatagcctgcaccttttcagccagcttctttgcgtttttcggcgttacttttattgtatctgcgcttccgatcgcaccggccggcagaagagcgccgaggtttttatcgaagactaactcatctccgttcggatttgcaatagtgccgtttctatcgaacacgaaatttgcttcgtttaagccgtgtgtatccggatttctcagaatgacggtagtgaagaaataagcgagattttttccgatctgctcgctcaatttcccatcaagccgctgcttccggctgaactgtgagagcgaggggtttttcgtataaatcgttgtcccgttgtggcggtcatattcgttccaataacctgccccgaccatgtcgtccggattgataattgaccggatgtaaggatcatatatgccgctgttgatgtctttctgtgtttcttcatcgtgcagttttacgacggaaggactgttaaacgcgacggcgtacacatcattattcaccgcgctgtattcggcctcagcgccgccgagtgaatggccggttgttgaaataatcgttgacgttccggcatactttttctttacgctgcgtaccagctgatcggcttgatcaatttgcgatgttttcgtcatcagcttatactttccggttgtgagcatggcgtcttgagagggcgttccattgtattttccgagtgttttcgaggtatcctttgcgtctttttttacaatataatgtacttcttttttcggatcatttccgaaaacaatattgccgccgtccgcttttacgccgtcattgatcgggtcttttccgatatcggttcccgcaaaggcgacgaccacgttttcggggttttttgattttatccattttccgtttttggacttgatgccttttgagaatacaaaggcatcaagacccgtaccagaatcctgcttcactttctcaacgtaccaatatgacgtcttacttattttataaggagttttatatttcatatgcagggctaacattttataattgtaagctgcttgactcaaacggtaatattctttatctgtgacattagagacggttatttcttttccttttggcatatatacatcacctttcttatattgtaaaatagttccgaaaggatgatacgcatgagaaaatacattattatcctaattgttataattatagcagtgggagggtttttcgtgaagcgtcaatatgataaacataaaaacgaagaaaaacttgtgattgaggcgcaagagcacatgaagaattacttaaaaaaagactataaaaatgtgcaggaagttcatttttcaaaagactacaatatcgatccgacaggcggagttgaagtttcaggctacataaataataataaagaaaaagaattttccggtatatatgatccaacgaacaaggagataggtatttcagtggtcaatgccgaagaaaggtaaaatacccacctcagggatgagtgggtatttattttgtttaattatcttacaaaattcgtgatatgtttctcatacagttcaaacctattcctgagaccaatcgcctcaaccgtctcatttgtcgaggtatccccgatattaatggtacaaatatcatgacaactcaacgataggaaaaacgtcagatcagcatttcactcgctttaagttccaatcttaacttgtcagcaacaatcgcgatgaattctgaattggttagctttgcttttgacatgctgaaagtatattcatatcaagttttcagtagttgcgtttacttaatccatgaggggaagtccaagaagcactgcaatattaagctatcaaatatttaggtgagcaaattactattgtaggttccgaccgttcgatgtatcctccgtatcttcttttacaaaataatacacttcttttttcggatcatttccgaaaacaatattcccgcagtcaaagatcgggccatttgtaatatcggttcccgcaaaggcgacgaccacgttttcgggattttttgattttacccattttccgtttttcttcactgcttgtactaatacaaccgcatcaagtcctgtattatcgtctgattttatttgatcgacgtaccagtgagtagtttttgaaatggaagaattaatgcgtatataatcgttcttctctaatttccttttaagatagtcatagttataagcacgttgactcatcctgtaatatgtttcatctgtcaggcttgaagtccaatttttcttgctcaagatatatagcgcctttcttcatgtaaaatagggtagggaaagggatgattttttttgaataaataccttattattgtactggtgttaattataaccgttggagggttgattatgaagcatcaatatgatgtgaaaaaggaagaaaaggctctttttgaaaaagccaaaagtaaaatgaccgaatacttgcatcacgagtacaagggaatagagaaaatttcttatgatgattattttattgatccaactggcggaattacagttgaggggtatctaaacggcgataaaactaaggaatttgacggtttatatgatcctgtaggtgacaaaatagggagctcctctgtggatgcggaagaaaaatcttaagacgcctaaatgcaccggatgtcatcaccatttttctagtccgcgagcttcatcataacttatgaaacggatgattctgtgaaaaaatacattatgatcttcattatcttaatagcagccggaggttttataatgaagagtatgaatgataaaaatgttcaggctgaagagataaagattgctcaggaacgaatggagaaatttatcaaagcgaactacgacggaatacataacgttacatttaaagataaatacgagatagatccaatgggcgggatagagatatttggctattacaacgatgatacatcgaataaatttgacggtatttatgataaggcaaatgacaagattatgggacacactatagatgctgtgagaaagaaagaatgcagagatagagattgcgattactaagaagacgctcgtctggcgttttttgataggagcatacactaaacgaaaagacaaggggccggcatttgccgcccttgtcttttttcattgaacattggagaacataatcagaaacagctcattatttgacagtccattttaacagcgttacaattaaacgtgtaaatagttacatgtttaagtaaacataataactcgggaggtgatacgtccttgaatgaaccttctttaaaaaagtcatttatgagtcagtgaaccgcatcattgatcccgagcatgtttatttccgtactgtgcctgtgtttgaaacaagcagcgaggcatatcagcatctgcaggaccgactgtttatcgggggctgcggtccgattgccggatgacattcggttagatatttatgaagttcaataataatatggagagtgagtcaacatggaaaactttatcggaagccatatgatttacacgtatgaaaacggctgggagtatgaaatctatattaaaaatgatcatacgatcgactatcggattcatagcggaatggtaggcggccgctgggtgcgcgaccaggaagtgaatatcgtcaagctgacagaaggcgtatacaaagtgtcatggactgaaccgacaggcacagacgtttccttaaactttatgccgaatgaaaaacggatgcacggaattattttcttcccgaaatgggtgcatgagcatccggaaatcacggtgtgctaccaaaatgattacattgacgtgatgaaagagtcacgtgagaaatatgaaacatacccgaaatatgtcgttcccgagtttgcggatattacgtatctcaacaatgcgggaatcaataacgaaacactgatttcagaagcgccgtacgaaggaatgaccgatgatatccgtgcgggaaaattaaaataagagaaaaaacccggcagcttggccgggtttttttgtatccttttacgacagggttttggtcatgataatgtcgacttgtttatcatcccccatataaaaagagtgttctccagtttggacaaaccccattttttgataaaaggcaattgcattttcgtttttttcccatacgcccagccagatgttctttttattgtgtgctgttgcgattttcacagcttcattcagcagatatttgccaagcccgtgtttctgatggttttttcttatataaattctctcaatctcaagagaatcttcccccattttttctgactgtgcttcgttcatgttgacttttacataccccgcaaggtcatcatgataataaacaaaatagaattgagaagacagattggataattcctttttcagctgttcagagcgaaatgcattttccaaataagctttcatattttcaggtgaattttgatccttaaatgtatcattgaatgtttcaatgcttatctcccggagctctgttatatcgttaaggctgcacttttttaattgaatactcatggtcatacagctcctttcttcatttatcatatcagctgattttttgttgtatttgcaatgaaaataccgtatagtaaacatatcgtatttttgttgtatttgcaacataaataagaaaatgaggacgataaagtgaaatatgttttttatgttttaggaatcatgatcttgacctttggtgtttctgtcacgattcaatcagggcttggaacgtcgccttttgatgcgcttattgtgggattgtccgtccatgcagggcttaccgtgggaagctgggaaatcatcatcgctttcctgttaatttgctgtaattcaatgttaaaaaggcaaaggccggaattttcagggatgattacggcgtttataacgggaatcgggattgatatgtggcttttttttctgcatcgagtcataacgcctgaactgtggtacggaaaagcgggctgttttgcaatcggtgtagttgtgatagggataggaaccgcaacctatctgcatacaaatttcgccccgatcccggttgatcggttaacgctaattgtccgcgatttaaccgggagaagcatctttttttcaagaacggtcatttacttcatatttttcatactggccgtgatgctaaaaggtccggtaggcatcggaacgttattaaccgtttgtttaggagggatcatccttcatttctttatgccgattaccggaagatggatagacggcatattaacagcatctccaaaacaggaagaaacgaaaacccggtaacgggggtttttacccgattctatcattttttcatttcatccgtatgttcaaggtataataaaaaagggggagggatttttatgagcggtcaaagaaaactcgttttttacggagctgtcagcgcagatggttatcttgcgcgggaaaatcattctttagattggttaatcggaactgaaggtgaagacagcaccgattatgaagctttctatgaatctgtcgatacgatcatcatgggcagaaaaacatacgaagaaatattggttttattgcctgaggaatttccgtacaaaggtaaagaatgctatgtgttttcgcggacattgaccgggcgtactgaacatgtgcggtttattcatgaagagcctgccgattttataaaagcattgaaacgccaagaaggcaagcggatttggattgtcggcgggagtgatctgctgcacccggttttggaggaaaaacttgtcgatgagtttatcattcagatcgcccccgttctgctcggccgcggaatttctttgttcaaaccaggagaccgggagacagggctgaagctgactgatgtcaggcgctataagcaatttgcggagttgcattatgaagtgagatgaaaacgaaacgccaagggagccagctcccttggcgttttttatgcttgaaacaggatgcggcgttttgctgaatcgggatcactttcgacagcggtatccgtgttgaaaagcaaagtttcgcgtgaatcggtttcatattcaggccaattgaagtgagaggtgttcgggtttccggtttttgcaaaagcgagccatgcggattggatttgtttggaaagctgttctgcgtcatcaccgagcggttcttgcagcgtctttctcaaagaatcaaagtttccgaacacaaacggcaattccagagcgtgaacggctttatgaaacggcggtgtttcgccatgccaatcaaagcggtacatccagaccggtgcgtgctgcgactgtccttgtgcgaaagcgacagccggccgccagaaaatcagatccgtcatcatatcgatttgtccctttaatgaatgcggatataaatctgccgcttgctcggtgcagttctctccgaggtgataatgcaaataatcttgctgctttttctcggaatgaatgtctgtatcaggggtgaaaaacaaatatgcttcatcacgattggttccgatgatcataggtatgccttctgcggccccgtctgctatggctttcaccggttccgcaggcaatgtggccggatcgatagcgggctgaaacaaaagctgaaaaatgttttgatctagtgagcgccgcactttatccgcagtcttaagcaggtcattaacggaaagctcctgcaattgatcagtgccggcttcatgaataaatgctgccgcgatgtcttttgccatgtccgccgggatcgtatgagaggcgccgctttctaaaatggctttatgaaacaggccttttgcgtcaggcattgccataagggaggcgatgctcatgccgcctgccgattcaccaaatatcgtgacgttatccgggtcccctccgaattcggagatattgtccttcacccagcgcagggcggcgatctgatcgagcagcccgatattggcggaatacgcgtcatgaatagaagacaaatgtaaaaagcctaacggtccgagcctgtaattgagtgtcactacaatgacatctccgtcagcggcaagggcagatccgtcgtaaagcggttcgcttccggcacctaaataaaatgctccgccatgtatccataccatgacaggctttttttcgccctctgaatcgggggcgaaaacattgaggtaaaggcaatcttcagattgagccggtatatctccggaaaacgatatagacagcatatcatccggctgcggacaaatcggcccgaacgagtcggcatgttttacgccgtcccaaggtgcgggaggttccggcgctttaaatctgagctctccgacgggcggcttcgcgtacggtatgcccttccatgtgcggacaccgcggccggcagttcctttcagtgcgccggagcgggtttgaacggtaagttttgtcatcatttcatcccctttttcttttcattataaacagagatgaagacatgaagcgaataaaagccttttcatcagcatatcatcagtaacgcttccgttctaaaaatgatctgacttcctgaacggacaagccgagttctttggcttcctgcatcagcgctttccattcctcaatgttggattcagtcagttttctgttgcggtagggtgcgggctccgagcgtttttcagtcagtttgttcgtaaaggtgaacagttcttctttcggcatgcccgactgcacggcctgcacaagatggatgcgccactcatcttccgtgtctcccatgtgatgcagcatcgtttcggcatcaaaaagctccgtcagatcgacctgcagggtggcggatacttttttcagaaattggatggacggatttgagtgaaccccccgttctatcttgcttaaataagatttagagacacctgcttcaactgctagctgattaatagagtagccttttcttctgcggtataaacgaattattcttccaatcattgtgctgaattctcccctgtatactggctttttttgttcattataagaaatctttcgttctttataaaatttaaaattataaggtaagtgcagtaaataagaggaaaatcatgataatgttctctaaaaagaaccaaatggcttaatttgaaattttcaaatttcgaccttttcttttataatccaatcattaacagaagggggcgtttaagcctgatgcaataaggatgaggctgtaattacatgaatgagaatatgagtttcaaagaattatttgacattattaaacacagatttttactgatttttatcatgacagcagttgtaacgctggtgacgggatacatccaattccgggtgatttcgcccgtttatcagtcatcgacccaagtgctcattcatgaaacaagcggtgaaaaaaattcgaatctcagcgacgttcagctgaatcttcattacaacaatacgtttcaaacgataatgaaaagcccggttgtgcttgagaaagtgaagcagacgctgcatctttctgagacggcatccgctttaaaagcaaagatcacgacaagcagcgaaaccgattcagagatcattaccgtagcggtgcaggacgagaatccgaaacaggccgccgctatagcgaacacgctgatgaagacatttaaaaaagaagtccgtgacaggatgaatataaaaggcgtcattgttttgtctgaggcaaaagcatcggaaagcccgatggtcaagccttcgcgcatccgaaatatcatgatggcgttcggtgcggctctcatggcgggtgtgacgcttgcgttttttctccactttcttgatgaaaccgttaaaagcgagcggcagctcagcgaaaaaacagacttgcctgttttaggggttgtgtatgacatcaaaaatcagcagacacggtctgatgaaaaacatttcggggagtgaggcgtttgggattcagaaaaaagaaatcaagaaggggactggctcaaatatccgttttacatcacaaatcattggtggctgaacaataccgcaccattcggacaaatattgagttctcctctgttcagacccatttgcgctctattctcgtcacttcttccgttccgggagaaggaaaatcattcagcgccgccaaccttgccgcggtatttgcgcagcaggaaaaaaaggtgctgctcgtcgatgcggatttacgaaaaccgacgatacacgagacctatcagcttgaaaatgtacaaggccttacgaatgtattagtcggaaacgcttccctcggcgaaacggtgcaaaaaacgctgattgacaacctctatgtcttaacgagcgggccgacgccgccgaatccggccgagcttttatcttcaaaggcgatgggagagctgattcaggagatgtacagccggtacagtctggttattttcgattcacctccacttttggctgtggcggacggacagattttagcgaatcagacagatggaagcgttctcgtcgtcttgagcggaaaaacgaaaatggataccgtccaaaaggcgagagacgcgctccagcagtcaaaggcaaagcttttgggggcgctactgaataaaaagaaaatcaaaaaaacggagcactactcgtattgagcggtgcaggtgatgtctccttacctttatcaacggaggcactcggctctgctgtgggcggcgtttttcgctgccttagatgctggtcgtcggtggcggggtgtgaggacgggttaaatgcccaatttatcttaagatgatgcattgttatcggcttagctgttatgtctgtttttacgaaaaccgtatcagctaaaccgataaatgaggaggggaaagattgacttaccggagaagactttcaatgatttttgcattggatacgtatctcgttttactttccgttgttataggatatcaattttttgaggattcttatcacttttatgactccggagcgttgctgctgactgccgtgagcatgctgatcagccatcatgtatgcgcttttatgtttcaccagtataagcaggtatggacgtacacgggaataggcgagctgcttgccttgatgaaggggatcacgctgtcagcagccgtaacggcggccgtccaatacggggtgttccacacgattttgttccggctgttggccgtcagctggatggttcagctattgttcatcggaggaagccggatgatttcacgggtgctgaaagaaacgatcggcaggaagcaaaatgactcttcccgggcgctgatcatcggcgcaggttcgggggggacgctgctcgtccgtcagcttacccagaaaaacgatctcggaatcatgcctgtggcttttattgatgatgatcagacgaagcataagctcgaaatcatgggcctgcccgtcatcggcggaaaagaaagcattatgccggcggtgcagaggctgagaattcaccatatcatcattgccattccgtctctttgcacccatgagcttcagacgttatacaaagaatgtgtgcagacgggcgcccatattaaaatcatgccgcaatttgacgagatcctgctcggaacgcaggctgccggacacatcagagatgtaaaagccgaagatctgctcggcagaaagccggtcacccttgatacgagcaaaatttctgacagcatcaagggaaaaacgattctggtcacgggcgccggcggctcaatcggttctgagatctgccgccagatcagcgcgtttcttccgcgggaaatcgtccttctcggccacggagaaaacagcattcattccgtacataccgagctgtccgcacgcttcggcaaagaggtgctctttcacgcggagatcgccgatattcaggacagagataaaatctttactttgatgaaaaaatacgagccgcacgtcgtctatcatgcggctgcccataaacatgtgccgttaatggaacataatccggaagaagccgttaaaaacaacattatcggcacgaaaaatgtcgccgaagccgccgacatgtgcggaacggaaacattcgtgctgatttcttctgataaagcggtcaatccggccaatgtcatgggcgcgacgaaacggtttgcggaaatggtcatcatgaacctcggaaagatcagccgcaccaaattcgccgccgtccgtttcggaaatgtgctcggaagccgcggcagcgtaatcccgattttcaaaaagcagattgaaaaaggcggacctgtcaccgtcacgcacccggcgatgacaagatattttatgacgattcccgaagcgtcaagactcgtcattcaggcgggggcgcttgcaaaagggcggcagattttcgttctggatatgggagaacccgtcaaaatcgtcgatctggccaaaaacctgattcatttatcaggctatacgacagaacagattcccatcgaattctccggcatccgtccgggagaaaagatgtatgaagaattgctgaatcataatgaagtacatacggagcagatttttccgaaaatccatatcgggaaagcggtggacgggaattgggccgtgctcatccgttttatggaggaattcagccgtctgcctgaagatgagctgagaaaacggctgtttgaggcgatcgaatcagtacatgaagaagcggccgcaggcgtgtgatgggaggacagaaagatgacgaaaaaagtattattctgcgccactgtcgattatcattttaaagcctttcatcttccgtattttcaatggtttcaggatatggggtgggaagtgcacgtcgcggcaggcggcaatatgaatcttccgttcgttgatgaaaagttttccattccaatccggcgctcgccgtttcatcccgaaaatctttctgtttacaggcggctgaaacggctcattcaggacaacggctacgacatgattcactgccatacgccggtcggcggcgtgctcgcacgccttgctgcgagacaagcgcgccaaaaagggacaaaggtgctgtacaccgcgcacggttttcacttctgcgacggagcgcctctgaaaaactggcttctttattacccgatcgaaaaatttctttcttcttatacggattgtctgattacgattaatgaagaggattacgaacgggccaagcaaatgaaaaaaacagcttgcggcgcgaaaaaaatacacggcatcggggtgaatacagacaggtttcgccctgtgagccgggaagagagtgaacgtctgagagaaaaacacggcttcagcgccggggaatttattctcgtataccccgctgaattaaacggcaataaaaaccagggacttctcattgaggctgcggcattgctgaagaaccgcatcccggagctgaaactcgtatttgccggagaaggcgcgatggaagcgccgtacagaaaaaaggctgaatcactcggtgtatccgacatggtgcggttttacggtttttgccgcgatattcatgaactgattcagcttgccgatctgtctgtcgcctcaagcatccgcgaaggactcggcatgaatctgcttgaaggaatggctgccgaaaagccggccgttgccgcggacaacagggggcaccgtgagatcatcgaagacggtgtgaacggttttctcgtgccggccggggacagcgcggcgtttgccgatcggattgaaaagctgtaccgctccccggggctgcgaaaagcaatggggcaagaagggcgcaggacggcggaatgtttttcagaaacacgtacggtaaaggaaatggcgcacatttacgccggttatatggataaaaaggagaaaagcgtatgaatgcaggagcacaaccgaaaatttccgtgatcatgggaatttataattgcgaagagactttagcggagagtatagaatccatcctgagccaatcgtataagaattgggaactgattatgtgtgatgacgcgtcaactgacggaacgtatcagattgcgcgccgttacgcggatcattacggcgaccggatcacgctgattcaaaataaaacaaatcaacggcttgccgcttcgcttaaccgctgtctgacatacgcaacgggggattatatcgccaggcaggacggtgatgacatctccaacccgaggagactggaaaaacaggccgctttcttaaacaagcacgcccactatcaagtcgtaggcacgggaatgctcgtatttgacgaattcggtgtaaggggcgcccgccttttgccgcccgtgccgaaaccgggaattatggcgaaaggcacaccgttctgccacggcaccattatgatgcgggctgaagcgtacaaagcgcttggcggctaccggtcagtcaggcggacgcggcggatggaggatatcgatttgtggctgcgcttttttgaagcgggtttccgggggtacaatctccaagaaacgctgtataaagtcagagaggacagtgatgcgtttaaaaggagatcgtttacgtattccattgataatgcgatcctcgtttttcaggcatgcagacggctgaagctgccgctttcccattacgcgtatatcgcaaaaccgctcatccgcgccattacgccgcccgcggtcatgaaccgttatcataaaaacagggacatccgccaaaaagaagggcttgccgaacatgactgacaaaccgatgcgggtgctgcacgtcttcagcggtatgaacaggggcggcgcagaaacgatgatgatgaatttgtaccggaagatggacagaacgaaggtgcagtttgattttttaacccataggaacgatccgtgcgcttatgatgaggaaattctcgctctcggcggacggcttttttatgtgccgagcatcggcagcacaaacccagttacatttgtgaaacaggtcaagcgggtgattaaggaaaaaggcccgtttgccgccgtgcacgcccataccgattttcagtctggatttatcgcattggccgctcgtttagccggcgtcccggtgcggatctgccattcgcacagtacgtcgtggcgggggcgggcgtcgcggcttgccgggatgcagctgtttgttttcagacggctgatcacggcaaacgccacggcactgtgcgcctgcggagaagacgcgggccgtttcttattcgggaaagaaaaagacgtgcatcttttgccgaacggcattgatctcgacttatttgccggcgggtgcgcggacacagaagctgaaaaaaggaagcggggcattgcagacggccgtttggtgatcggccatatcggccgctttacagaagaaaaaaaccatgaatttctgctccggctggccgctgatatgaaagagcggggcatcggtttacagctgattctcgccggagacggtccgcttcgcaccgacatggaaaatctggcggcgaagctggggcttgatgatgaggtgcgttttatcggcatagaagaccgcgttcatgccctgctgaaaacgctggatgtatttgtcatgccgtctctttatgaagggctgcccgtcacgctcgttgaagcgcaggcctccggggtgccgtgcgtgatatcagacggcataacggaagaagccgatgccgggctcgggctggtcaaaaggctcagcctcaaagaaccgcccggacaatgggcatccgcggttttacgggcagcagaggcggcaaagcctgacggggcgcgcattaaagaaaccctcagacggcagggatatgacgcgggagaaaatgcgggggctgttatgaagctttacaatatgaattggaaaaaggaacagtaacgaatgattgtatacgtagtcaatatgggaattgtgtatatttggtcatggttcgccaaaatgtgcggcgggcgtgatcaatcgctttcgaccggataccggccgaatcagctcgtcatgatcgttccgctgctatcgctcgtattggtctccggcttgcgctacagagtcgggacggattttcagacgtacgcgctgatgtacaagctggcgggaaattacggcagcatttgggagatcttcgggttcggagcgaaaaaagcagccgttgatccggggtttacggctctcatctggctcatgaattttatcacgaaagatccgcaaattatgtatttcaccgtgggggtcgtgacgtgcagctttattttaaaggggctcgttgagttcggccgtccgtttgagctgagtgtgtttttgtttttgggcacgtatcactattacgcttcctttaacgggatcaggcagtatatggtggcggccgttttgttttgggccgtccgctacgtgatcagcggaagctggaagcgttatatgtcaatcgtgctgctgtgttcgctttttcattcctcagcgctgattatgattccggtttattttctcgtcagaaaaagagcctggtcgcccgcgattttcggactgtcggcattgtttcttcttatgacgttcctgtatcagaagttcatttcgctgtttgtcgtcgtgctggaaaacagctcgtacggccattatgagaaatggctgatgaccaatacgaatgggatgaacgtcgtaaaaatcgcggtgctgcttctgccgctgtttttggctttctgctatcgggagcggctgcggaagctctggcctgacattgatgtcatcgtgaatttctgtctgctcggcctgctcttcggtcttttggcgacaaaggatgttatttttgcccggtttaatatatatttcggcctgtaccaaatgatcctgatcccttattttgtgagaatttttgatgaaaaatcaaatgcgctgatttatatcgccattattgtctgttattttctttacagttacttgcttatgccggtcgattcgtctgtgcttccgtacagaacgattttttcccggtaatggacactggaggtttatatggaaacacccgcggtcagtttattaattgctgtgtataatacggaaacttatttagaaagatgcttagattcattgctcaatcagtcgctcgccaatatcgaaatcgtggccgttaatgacgggtcaacggatcaaagcccggcgattcttgaaacctatcagaagcgggatgagagaatcagggtcattcatcagcaaaaccgggggctcggagccgtccgcaacaggggaatcgaggcggcgcgcggcgaatttatcgcttttattgatgcggacgactgggttgaacctgattattgcctgcgcatgtataaaaaagcgaaggctgatcaggctgatctcgtgatttgcgaatatgcggccgagtttgcggatacggggaaaaccgccgtttcaacgattgcttcagcgtacgagggccgcccgaaacaacggtacctgagagatttatttgaaggaagagtcagcggtttttcatggaacaagctgtacaaaagaaccatgatcgagcatcatcagctgcgctttccgcttcgtgatgagctggagcacgtggaggatcagtacttcagcctccgggcgcatgttttcgcaggtgcggtctcgtacgtggatcagccgctctatcattatcggattcacttgacttccattgtgcaaagctatcagaaaaagctgtttgactcaggtctcgttctctatcggctgaacgaggcttttttgcgtgaaaacggctgcttacaggaataccggcaggagctggattttttcatcgttcagcacggaacagtctgcctgctgaatgaatggaagcggaataacggcggccggttttctgagaagtggaagaatatcagccggatatgcgctgatcccgtatttcgcctgagcctttccaaaaccggaacggcgccgtttgacgccaaacgttcatgccttctgcttttggcgaagctgaagctgattccgttcgtgtcgctggcatcagccgcgtatcagcgggcaatcgagtacaaaatgaaaatcagagggtgaagacatgtcgatacaatctttaaaaatcaatctcgcggaatggctattgcttaaggtcaaatacccgtcccaatttcacttcggaacggcagcggatggggcggggcttacagcggcaagaaaaaagatcattctgacgctgctcccgtcccacgataatctcggcgatcacgccatcgcctacgcaagcaaaacgtttcttgaacgggagtatcccgattttgacattgtcgaagtggatatgaaggatatctacagatcggcaaaagcgctgatcaaaaagcgccaccccgatgatatggtattcatcatcggcggcgggaacatgggggatttgtacaggtatgaggaatggacgcgccgctttatcatcaaaacattccgggaatatcggatcgttcagcttccggcgacggctcacttttctgaatcaaaaaagggacggaaggagctgaagcgcgcccgaaaagtgtacaatgcgcatcccgaccttttgttaatggcgagagatgagacgacgtatcaatggatgaagcgtcattttcccggaaaaacagtgctcaaacagcctgacatggtcttatatttggataaaagcgagcggcacatcccgcgggaagggatctacctctgtttacgggaggataaggagagtgcgctgacggctgaggacagaacgatggtaaaagaagctttggcaaaagagtacggcgagctgcattcctttaccacgacggtcggccggagggtcagccgccatacacgtgaaaaggagctggaggcgctttggaatacgctgaaaggcgcggaaaccgtcgtcactgacaggcttcacgggatgattttttgtgcgctgacgaaaacgccttgtgtcgtcattcgttcgtttgatcataaagtgatggaaggctatcaatggctgaaaaacataccgaacatgacattgcttgaacgtccagaccctgaaactgtaacggccgccgtaaaccagctgctcagcggcaagcatgaggaaggcggttctttgcgaagtgtttattttgccgggctgcgctcgaaaatcagcggtgatgcccaatgaccgcgccgcttgtgagcgtgatcgtgccgatgtataagacagagccttttattaaagaatgcgcggtttctttaacaaaacagacgctgagagacatcgaaatcattttcgtcaatgacggctcaccggatcagtcaggccggattgctgaacaattcgccgcagaagatgcgagaatccgggtgattcataaagaaaacggcggcctcagctcggcccgcaatgccggaataaaagccgcccgcggccgttatatcggttttgcggacggcgatgactatgtgacggaaacgatgttcgaaaggctttatgaagaagcggagaagaaccggctggatatcgccggctgcggttattataaggaaacgccgtctaaagaaagaacatatatgccgccgtccattccgccgggccgcgtcttcacagcggatgaaatgactgcattgctgacccgcgcgcacgaacatcggtttatttggtatgtgtggcgctatatataccggcgggaatcattgcaaggactgttgttccatgaagatatccggtttgccgaggactctccgtttaacttggcagcgttccgccaagccgcgcgtgtcaaagtgatagacgaagggctgtatatctaccgggaaaatccgcaaagtctcacagaaacaccgtttaagccccacttagatcaagaactgcaaaagcaatatgcagcgaaaatggctttttatgaggcgaacgggctgacggacgcctgccggagcgatatcgatacatatttgtgcaagcatcagattccgatgctgatcgccaacgcatgcgccgccccgcagctgtcacatcagattacggcgcacatcggcagaatcttaacgtatgacatggtaaaaatggcggtgcgcaggacgccgtgccgccataaacagctgctggcgggggagcgcgtggtgctcggcctgtgcaaaatgcgccttcctcttcttctgcatgcgtttttcgaacggaaatcgaaagagaaaggcagtgcggaaggagcatgaaatttgccattaatttcggcgccaatgtgacggcgtttttactatcggtgtttttatcagtgtggatgacgccctttattgtgaaaacattaggtgtggaggcttttgggtttgtccatctgacacagaatatcattaactatttctctattatcaccgttgcgctgagctctgtcgttgtgaggtttttctccgtcgccgcccacagggggaacagggacgaggccaatgcgtatgtaagcaattatttagccgcgtctgtcgtgatatctctattactcgctgtgccgctcgccgggacggctttttttattgacaagattatgaatgtgccggccgggctgctaacggatgtgaggctgtccatcgtaatcggcagcgtgctgtttatgctgacattttttatggcgggattcgcgacggggccgttttttgccaacaagctttatatcacaagttccattcaggctgtgcaaatgctggtcagggtgctgtgtgtgctcgctctgtttacgtgcctgccgccgaaaatctggcagatccagctttcggcattagcgggagctgtctgtgcggctgtgctgacttttttcttctttaagaaattgattccgtggttttctttcagccgtaaaaccttgtcattacaaacgagcaaagtgctgttttcggccggtgcctggagctctgtcaaccagatcggcgtgctgctgtttctgcagattgacctcatgacggccaaccttgtgctggggccgtctgaagcgggtgtctatgcggcgattattcaattcccgctcctgctcagaagtcttgccgggacgcttgcttcactgtttgcgccggttttgacttcctactattcaaaaggcgatatggaaggtctcctgtcttacgccaataaggctgtgcggatgaacgggcttctgctcgcgcttcccgccgcattattaggagggcttgccgaaccgtttctggcgatttggctgggcccgtcgtttgtgcagacggcgccgcttttatacattcacgccgcgtatttggcggtcagtctctctgtcatgccgcttttttacgtatggacggcttttaataaacaaaaaacacccgccgtcgttactttatgtttaggcggactgaacgtcatattggccgtggttctcagcggaccggcacatctcgggctgtacggcatcaccattgccggtgcagtctctctcattttgaaaaatgccgtcttcacgccgctgtatgtttcgcatattacgggctttcagaaaaccgcgttttataaaggcatgttcggcccgttggcggcggccgtatttgcctgggctgtttgccggggtatccggctgttttcaccgcttgacagctgggccggcctgatcgccgcagggcttgccgtatgcataagctatgccgcattcgcttttttcttcatttgtacgaaagaagaaaggcggcttgctttacagaaataccgaaaagtgaaaggagctgttcagatttgaaggcgaaacgtgtatttgatatagcggccgcgacgttgttattgtgcggcgcgagcgtcatccttctcttcgccatggccgccgtcagatgcgccatcgggtctccggtattgttcaaacagacgagaccggggcataacgggcgtccgtttacgttgtataaactcagaacgatgacggatgcgcgtgatgaaaacggtgtgctgcttccggatcatctccgcctgaccaaaacgggaaggctgatcagaaaactgagcatcgatgagcttccccagctttttaatgtgctcaaaggagatatcagtctggtcggcccccgccctctgctgatggattatctgccgctttacacggcggagcaggcgcggcgccacgaggtgaagccggggattacgggctgggcgcagattaacgggagaaacgcgatttcatgggaggaaaaattcaagctcgacgtgtggtacgtcgacaatcgcacatttcttctcgacttaaagattctgcttttaacagtgaaaaaagttctcgtgtcagaaggcatacatcaagccggtcatgtgacggcaaagcgcttcacaggcagcggagatatgtcatcgtgaaaaaggtcgtgctgatcggaaacggcggacacggaaaagtcgtgagagaaatcgtgcaggcccgttccgatatggagcttgcgggcgtattggatgacggattcagcggttttgccgttcggaacggtttatatacgggccggacggaagacgtgcacatgcttcggaagctcgtccccgaggccgtattcacgatatgcatcggccgcaacggcgtcagaaagcagttcgctgaaacgcttgggcttgaagatgatgattatgccgcactcattcaccccggagcgatcgtcagtgaaacggcttccgtcggacacggaacggttgtgatggcgggcgccgtcattcaggcgggcgctgacatcggcgcccattgcatcatcaatacgggggcggttgccgatcatgacaatgcaatcggagattacgtccatctttcaccgcgcgcggcgcttgccggcggagtgaaagtcggggaaggaacgcacatcggaatcggcgcgtccgtcataccgcagattgacatcggcccttggtccgttatcggcgcgggggctgccgtcatcagccggattcccggccatgtgacggcggtcggcgttccggcccgcatcatctcccctatccataatgaaaaaggatgatttcatgcaaacaaacaaacggatttatttgtctccgcctcatatgagcggaaaagaacaggaatacattgcagaagccttccgctccaattggattgccccgctcggtccgctcgtcaattcgtttgaagcgcggctcgcggaatatgcgggagtgaaaagcgcggcggccgtaagctcgggaacggccgccatccatcttgccctgcggcttgcgggtgtgaaaaaaggagacgctgtattttgtccttcctttacgtttgtcgccacggcgaatccgattgtgtatgagcaggctgagcccgtttttattgattcggaatgggagacgtggaatatgtcgcccgatgcgcttgagcgggcgctgcgggatgcaaagcggcgcggcagactcccgaaagcggtgatcgccgtcaatctttacggccaaagcgcgaaaatggatgaattaatgagcctttgtgacgcatacggcgtctgtctgattgaagacgctgccgagtccttaggatcaacatataaaggcaggcagagcggcacgttcggccgtttcggcatttattcctttaacggcaacaaaatcattacaacatcgggaggcggcatgctcgtgtctgacgatgaagccgcgattgaaaaagcgaggtttcttgcgtcacaggcgagagatgccgccgttcattaccagcacagcgagctcgggtataactacaggctcagcaacattctcgcgggcgtggggatatcgcagctggaagtgctcgaagatcgcgtccgggcgaggagagaaatctttcacaggtatcgggaagcgctggaaacgtatccgggcatccgcatgatgccggagcttgaaggaacggtttcaaaccgctggctgacggctctgacgcttgataacggcgtgacgccggaagaagcagtcgcctgtcttgcggaacagaatattgaggcccggccgctgtggaaaccgctgcatacgcagccgcttttctcatcttccgtcttttatcctcacagcgaacatgaacgggtctctgaaaatcttttcagccggggcatctgtctgccgtccgggtctgacttgtcttctgaggagcagcagcgtgtcattgacgcacttgcgcaactgtttgaaacgaaaggggagaaaacatggacaaccgccatgttatgagccgattaaaagaaacgttgacggggctgctcagcgttataccgccgcaatctgacatcatatatgccgactatcccctctacggaaatgtaggggatttattgattatgaaggggacggaggcgttttttaaagcgcacggcatccgcgtgaaacagcgctggaatcccgacaattttccattcgggcgccgggcggacaaaaagacaatcatcgtctgtcagggtggcgggaatttcggggatctctatccgtactatcagacgttcagggaaaaaatcgtcaaatccttcccggaaaacaggatcgtcatcctgccgcaatccatttattatcaggatgagacacggctgcaaaagacagcggcgctttttgcggagcacaaggatctccatctgtttacgagggatcatgtgtcatacgagaccgcgaaacgctttttttcggcgaatcatatcgggcttatgcctgatatggcccatcagctgtatccgatggcggcgtcagcggctccgtcacgcggcaggcttcattttatccgcacggatggggaaatcaatccgaagctgcaaaccaattcttccgttaaaagctgcgactggcaggatgtgctgtcagcaagcgaccgcaggggaatcgcttttttccaaacactgaatgttttgaataaaaaagcgggaaacccgctgtcgattgcgcggttttggaaacgctattccgatttcttaacgaagaaagcggtcctgtttttcagcagatacgaatcggtggaaacgtcaaggcttcacggtcacattctgtcctcgcttctcgggaaacctaataccgtcattgataattcatacgggaaaaacgccaactattattacacctggatgcacgaagcgccggatgtccgtctgatcggggaaaccgccggcacgaaggaaaaccttccgctttgaatgagcggaaggtttattttgtttcaccgcgttttactttgttgtacgcctcatccaaatgctgaattcttttgagcacaaccgagttttttgtcagctgatcctgaacaagggttgaaacgacggaacggtaatagctgttcatcgcatgaattcggtcttcattcggattcatttcaatgtgctgtgtaaagttttcaataaaataaggaacagaaaaaagttctgacatctataaagcaactccttttaataagtatatacggtatgaaaccaatcatgtacaatgaaaaaaggggagtgagcatgatggatatcaaacttcagcaaacacaaatgttaaagcctcaattaacgcaagagcttaaacaggctatcacattactcggatacaattccgcggaactggccggatatattgatgagctctcactggaaaaccctctgattgaacgaaaggaaacagacacgccgctactatcttaccataaaacaaataaaaacaggatgaaagaacgggacggaagccagcagatcagacttacccgcaaaacgcttcaggattcgctcaaacagcaagccttagacatgaagctgtccgatgatgagaaaaaaattttcaattatctgatacattcattggattcaaacggatatttaaaagaggatataccagccgccgccgaccatgtatccgcttcacaagaggagacggaagcggttctgaaaaagcttcaatcccttgagcccgcgggaatcggcgcccggtctttgcaggaatgcatccttcttcagctccgccgcttgcccgagcggaacgaacaggcggaatggattgccgaagcctattttgagctatttgcaagaaagaactggaaagcgcttacactaaaaacgggcattccgcttaaagacattcaggacatcgctgacatgatcagcgcgcttgatccgaggccggggctctgttatgcgcatgaggagccgggtttttacgtggaaccggatattttcatcacagtgaaaaacggcatcattcaagcgcggctcaacagccgttcgtttcctgacatccagcttcatacccattatcagccgctgctgtcagctgccgggtgccgtgacacgaaaaattatctgtcggcaaaatatcaggaatggcgctggctgaaccgggctttgtcgcaaagaaaacaaacgatcacgagaattatcggcgtcctgactgaacggcaggaatccttttttctcacaggaaaaagcggaatgcagccgctgaccttaagagaggtggcggaaacgctggagctccacgaatcaacgatcagccgggcaatcaaagggaagtacgttcagacgccgtacggactgtatgaaatgaaaacatttttctcggcgaaagctgaatcatcgggggacggcggtgcctccaattatgccgtgaaagcgcatctggaggcattggtcggtaaagaagataaaaagaaacctttttcagaccaaaagcttgccgatctgctgcatgaacaatatgacatccgaatctcaaggcgcaccgtcgccaagtaccgtgaccaattaaatattccgccgtcatcggcgagaaaacggtacagctgaaacctccccgagccaaaccccggggaggttctccgtgttacgggatcatccatgaaaacagatgatgctgtaaaaatgtaatgagacagacgagcagaagcaaaaacagactgtgcttaatcgtaaagcggaaaaggtcggcttccttgcccgccagaccgacagcggcacaggcaaccgcaatggattgcggagaaatcatttttccggtgacaccgcctgaagaattggcggcgacggagagaaccgggtccatcccgacagagagcgccgttaccttttgcaatccgccgaacaataggttggccgacgtatcagagccggtaataaatacgccgagccagccgagcaccggcgaaaaaaaggtaaacatcgcgcccgtcatggcaagcgcaagaccgagtgtcgtgctcatgccggaagcattcgtcacataagcaaagccgacaacagaaacaatggtcacgaccggaagcgttaattctttcaccgtttctataaacgcttcgccccaagtcttccacgacatgccgagggcgaacttggagatgacggcggcaatcagaatcgccgtccccgctgaaccgaaaagctcaagtttgtacacggcttcaataggcgtgccgtccgcctgaagaatctgctgatttacaaatgggacgggaggcgtgaaggtcaatgcacgcccggctgcattcagccaggaaagccacattgacgttccttcgtaatgaccggttaaggcagccttcacgccgggaatcccccagacggatatcatggccgtcagaagaaggaaaggagaccacgctttaaacaccgcggcgcccccgtacttgatcggcgcccggtcagcggccgctgctgattcccgttctgccgcgaaacgaaaggccgttttcggtttccaaaatttcaaaaacacagcgagcgcggccatggaaactagcgccgacagcacatccggaagctcaggccctaaaaaattcgagcttgcgtactgcacggccgcaaaggagacgccggaaacaagaatggccggccatatctcaaaagcctttttaaacccgctcatcaaaatgattaagtacagcggaataaagacggataaaaacggaagctgccggccgaccatttgagaaatttccattgccggtatcccggtcggaccttcgacggcggtaatcggaatgccgatcgcgccgaaggcaacgggcgccgtattggcaatcaggcaaattcccgccgcatacagcggctgaaaaccaagtccgacgagcaaagcagccgagatcgcgacgggagcgccgaaaccggcggcgccttctaaaaacgccccgaatgaaaaggcgatgagcagcgcctgcaaacgccggtcatctgtaattgacagcaccgaactccggataatctcaaactgtcccgttttcacggtgattttatacagaaagaccgatgtgacgataatccagccgatcggaagcagcccgtacaccgctccttgagaagccgacatcaccgctttttccgccggcatgccgtaaacaaatacagcgattaaaagtgaaacggctaatgttaaaagccccgctatgtaccccttcatccgtttcaccgcaagcgcccaaaaaaagaagataatcggcacgagcgcgcaagctgccgataaaagcaaatttccccctaaaggagcgtacccctgtgtccattgcatccctaaaaaacccctccttatgtcatgtaagcgattactttttatgataaggtcatctgatgaccgggttaattagcattatattttgaaagttttgaaagtacaatacttttcttgaacaaattgtctgaacctgtcggcaatacaaaaaaagaagtataatagacgataaacatcaagattcacaagtgacggggtgatcgcgttgaaatataaacaaattaaaacgaaaaaaatctacgaggaagtcgctgacgcattgctggagaagataaaagcgggcgagcttaagccgggtgaaaagcttgattccgttcaggcgctttctgagagttttcaggtcagccgctcggcggtcagagaagcgctgtcggctttgaaagcgatggggctcgtcgacatgaagcagggagaaggcacatacataagagaatttgagccgtctcatgtttcccagccgctttcttccgccctcttgatgaaaaaagaggatgtcaaacagctgctcgaagtcagaaagctgcttgaactcggcgtcgccgccatggccgctgaaaaacgcaccgaagatgatttacaaaaaatccgccaagctctcatggagatgaaagacattgacggagacgaagaattgggcgaaaaagctgatttctcctttcacatggcgctggcggaagcatcacaaaacgggctgctcaagcatctcatgaatcatgtctccgcgcttcttttggaaacgatgagagaaacgagaaaaatttggctgttttctaaacgaacgagcgtgcagcgattgtatgaagagcatgaacgcatttacagcgccgtcgccgccggagacgcggatgaagcggaagccgcgatgaccgcgcacctgacgaatgtggaagaagtgctgggggcttattttgaagaaaatgtatagaagctgacttgtgaaaggggataacatcacatgcaggccgaatcttttttttctgaccatgtaaagaaagctctgacaaacgatcctcccggggaatggatgccggcagttccgaaagcgtgcatccccctgcattccggctatcccaatcccgcactcgttcctgataaggagctgaaagaagccgccgcccgccttctggatgaggagcgcgatctgccgctgcattatatgggaagcccgaggacggccgttttaaaaaagcagattcaagaacgggcagccacccgtggcattcactgtcgggacgatgagctgctcgtgacgtcaggcgcctgtcaggcgatagatctggctgcacgggttttcctcgatgaacaaaccgccgctgccgttgaagctccggtctacatggaagcgctcgagatttttaaaaattacacaccgcatatcatgagcattccgacagatcaagagggcctgcaaacagaaacattagcgctcatgcttgaggaaagaaaacgaaaagggcttctgcttccccgtcttctctacacgatacccgcttttcagaatcctgcgggaaccgtaatgtcagcgaagcggagaacccgcctgcttcagcttgccgaagcgtatgattttctcatcttggaggatgatgcatacggcgagctcggattcaccgatattccgccgcccttaaaagccatggatcaaaacggccgggtgctgtacgccggttcattatcaaaagtcatcgccccgggtatgaggatcggctggattgcaggggacgccgcattcatcacggcattgtcatggttaaaaaaagacttaggccacccgttttcccaagcggtgaccgccgtctatctggaacaaacgaatgttgaaaaacggctcgccgtcttgcgggaagcatatcaaagcaaacgtgacgttttgctcgccgcatcagagagatatcttccgaaatccgcatcctggcacgtgcctgaaggcggttactttgtatgggtgaaagcgccgggagcggatacatccgcaatgctggcgagggctctttctcacggcgtttcctatgtacccggtaaatatttttttctgcatcatgaagacggtgcggaatatctccgcctgtcgttcagttatgccggtaaagccgcgataaaagagggtgtgcaaaaactgggacgtctgctggaaaacgggatgtagagcagcttgaggagctttcgggcttctcttttttttgtccccttcagcgcatcggacgaaaggatttttcagaaaaaccttccaatccatattcagaatagtgtaggatattcatagagcttttcctaaaaacaggtcatcagatgaccggatcacatattgaggatgaaagaggggttcatcatgaaagtctcattatttgtcacgtgccttgtggatatgttccagaccaatgtcggaaaggcgacggttgaggtgctggaacggctcgggtgtgaggtggattttcccgaggggcagatctgctgcgggcagcccgcatacaacagcgggtatgtgacggatgcgaaaaaagcgatgaagcggatgattgccgcgtttgaagaagcggagtacgtcgtcagtccgtcaggttcctgtacgacgatgttccgtgaatatccgcatctgtttcaggacgatccgaagtgggcggcaaaagcgcagcagcttgcggacaaaacatatgagttaacagattttatcgtcaacgttctcggggtggaggatgtcggggcggtgctgcaaaaaaaagcgacagtccatacatcgtgccacatgacgaggctgctcggcgtgtcggaggagccgatgaagcttttgcgccatgtcaaggggctcgagctgaccgcgcttcccggaaaacatcaatgctgcggattcggaggaacgttttctgtgaaaatggcgcaaatctctgaacaaatggtggatgagaaggtcgcctgcgtggaagacacggaggccgaggtgctgatcggggcggattgcggatgtctgatgaatatcggagggcgtcttgaccgtaaggataaaaacgtcagagtcatgcacatcgccgaagtgctgaacagcagataagacgagaaacaacaaggggggaaaatcatggcgatgaaaatcggtaccgccgcttttaaagagcgggtatcagaaggaatagataatgagtttatgagaggagccgtctccggagcgcaggaacggctcaggacaagaaggcttcaggcggccgaagaattgggaaactgggaggattggcgttcccatgcggaagaaatcagacagcatgtgctggacaatcttgatttctatttggaacagctcgccgaaaacgtcgccaacagaggcggacatgtctttttcgccgaaacggcggaagaagcgtcctcctatatccgcgatgtcatccggcagaaaaacgccaaaaaaatcgtaaaatccaaatccatggtgacagaagaaatcaatatgaacgaagtgcttgaggaagagggctgtgaagtcacagaaacggatctcggcgaatacattctccagattgacgaccacgatccgccgtcacatatcgttgctcccgctcttcacaaaaacaaagagcagatccgtgacgtgtttaaagagagactcgaatataaacagacggaaaaaccggaagagctcgttatgcacgcgcgcagcgttctccggaaaaaatttctcgaagcggatgtcggcattacaggctgcaactttgcaatcgcggataccggatcggtcagtctcgtgacgaacgaaggaaacggccgccttgtgtccgcgctgccgaagacgcagatcaccgtgatgggaatggagcggatcgttccttcattttctgagtttgaagtgcttgtcagcatgctgacgagaagcgccgtcggccagcggcttacaagttacattacggcgctgacgggacctcgtcagcaaggagaagctgacgggcctgaggaattccacctcgtggttgtggacaacgggcgttcccgcatactcggcacggaattccaatcggtgctgcaatgtatccgctgcgccgcctgcatcaacgtctgtcccgtgtaccggcatgtcggcggacactcgtacgggtccatctattcgggtccgatcggcgccgtcttatcgcctcttctcggcggatatgacgaatacaaggagctcccgtacgcatcttccttatgtgcggcctgtacggaagcatgtcccgtcaaaattccgctgcacgagctgctgctcaagcatcggcagaacatcgtggaaaaagagggcaaagcgccgatcagcgaaaaactggcgatgaaagccttcgggctcggctcgtcatccccgtccctttataaaatgggatcgaaatgggcgcctgccgccatgacgccgtttacggaagatgacaaaatatcaaaagggccggggccgttaaaagaatggacggcaatacgggatttcccggcgccgcataaatcgaggttcagagattggtttaaagaccgggaaaaacaaaagggggaagaatgatgatgaaagggacggttacacatcaggaatcctttttaaaccggatcgccgaaagtctgggcagagagcgcaggaaatcaggcgtgtccctgcctgaatggaagtatcagccacaatatcaaacgcatgcggactgtacggaagacgatcttgtcacgatgctgaaagaccactgcgtcaacattcataccgaactgatcgaaacggatgcagccgggctttacgacgctttgcgcacgcaggtgaaccgctttgaaggagggcctgtcatcattccgaaggacagccggtttgaaacgtacggcttgcagacccttatgacagaagagtggccggacgaagggattcccgtttgggaatgggacgcggaacaaggagcgaaaaatattgaaaaagcggaacaagcgaatgtgggcattacattcagcgagatcacgcttgcggaatcagccaccgtcgttttgtatgcgtcagagcatgccggccgttctgtcagcctgcttccgaccacctatatcgcaatcatcccgaaatcttccattgtgccgagaatgacacaggccagcgatatactgaaacagcagatcagagacggcgtcaccgttccttcctgcatcaactatattactggaccgagcaactcggccgatatcgaaatggatttggttgtcggcgtccacggacccgttaaagccgcttatatccttgtgaatgaccgataaaaaaacaaaccccggttttctgatatgatcccctcatagcagacagaaaaaagaaagcatactgatctgtctgcaatgaaggggattttttatggggaaaatacgtaaaacttatgatattcactttaagaaaaaagttgttgatcttcacctaaatgatgggatgggttatcagacaatcgccagagaaatgaacaagcacaactcaaaaagcaaagcaataaaattaatttgcggataattaaggagagggggaagaaatacccctcttttttaccattataacgatgcattgaaaatgattaggcgaatattataagatttaggaaatattgttataaggtggttttgaacaacttatgaacagtattcaaaaagaaactgaaaagatcaatgcatctagggactggttgatttatatcacagtatcagtaatctttttaatagcagtatcgatatttagcttttttgagtcggaagttgattttaacgttatggctctccgattatttgatgctttgatcagctgtatcttagttataaacggtctttattttatgcagaaaaacaaagggatagccgtcgtttccttccttttaggaataattaatctagggatattagctgttcttttgtttcgttaaagaaagaggagcccagctcatattgatatgatcccctcatagcagacagaaaaaatagaaagcatactgatctgtctgcaatgggggggattttttatggggaaaacacgtaaaacttatgatcttcactttaagaaaaaagttgttgatcttcacctaaatgataggatgggttatcagacagctgaagcagttcaagaagcagtatgtaaatatatttatttttacaaccatcaacggttccaaaagaagtgaaacaacctgagcccatatcaatacaggactcaggctgcttcgtgtttttttaacactgtctgcttgacaggggtcacttcatgcggccggggtttgtttttatataaacgcgttaatgatcatgataaaacagatcgcactgacagaaataatcgtttccatcgccgtccatgtcaggaacgtttcttttaccgtcattccgaaatactctttaatgagccagaaaccggagtcattgacatgtgacagaatcaaagagcctgctcccgttgccaaaacgagaagctcgctgctgacgcccggcatgacagatgcaatcggagcaacaatgccggccgccgtcatcatggcgacagtcgctgaacctgtggcgacacggatgaccgccgcgatcgtccagcttaaaagaacgggagagaagcttgagtgtttcgccatgtcagcgatatacgtgccgacgcctgaatcaatcaggacgttgttaaaagcgccgccggctccgatcacaagcagaatggaagcgatcggcccgagacagtcattgctgaattttaaaatgctttctctgtcaaagccctgataaaaaccaaggctgaaaaaggagtaaaccgtggcgatcaaaagcgccgtgacagggtcgccgataaatttaaaagtttcatagagcgtgcttttttccggaagcgcaatttcggcaagcgttgccataagcatcaggatcaccggtaccaatatcgtaaacaatgtatttgcgaatcccggaagcttgcgtttttcattccgttcaataaattgttttttcaacagttcgggaacgggtttatgaatgcgcttaccaatccattttccgtaaagcggcccggcgatgatggcagtcggaatgccgacgattaaagaaaacaaaatcgtttttccgacattggcgtgataaatgccgacagctgccatcgccgccgggtggggcggaaccaatccgtgcacgacggaaagccccgcaaggagcggaatcccgatcgtcactaatgaaaccccggtttcaattgcaatcgtaaacaaaagcggcacgagcaggacgaagccgacctggaaaaagaccgggatgccgacgataaaagcgacggccatcatcgcccaatgcactttctttttgccgaagcggccgatcagggtgtgggcgatacgctccgcaccgcctgattcagccatcatttttccgagcatcgtaccgagggccagcacgatcgcaagcagcgacagcgtattgccgagcccggttttcatcgaagcgataatgtccggcagattcatgcccgttgcgaaaccgacaaggatggatgtaatcagcagactgataaacggatttaatttagcgaccgtaatcaataagagtaaaacgataatagcggcaatgacaataaacagtaacatgaccttttcaccctttcaaagaagaattaacggctttgtttgagctgaaattcactgatgacgtcaaattcatctttgagcttgtcatacagccgctcgtataagtaaaacagctcaatatatgtttcgctgtttttgacgttcggttcatggcggtgagaaattctgatccagtcctgaacatcctcgatccgttccatttcgccaaggctgtgcaaagcgagaacggcagctccgagcgccgaggcttcgtaactttccggaacgaggacttcccgtcccatcgtatcggacaaaatctgcctccaaagcggtgatctcgcaaatcctcccgaagcccgcacgtcttttgcagggcccgccaaatctctcagtgcgacaccgattgaaaagacgctcatgatgacgccttccagcaccgctctgataaaatgctcccgtttatggcggaggctgatgccgaaaaacgttccgcgggcattcggattccaaaacggcgcgcgctcccctgataaaaacggcagaaacagcaatccctcagagcctgcgggcactttatcagcgatatcaatcattaaatcgtacggatcaatgccgagccgcttcgccgtttcgacttccggagaagcgaattcgtctcgaagccagcgcagcataatgcctccgttattcgtcgggcctccgatgacccaatgcttgtcagtcagcgcgtaacagaatgtccgcgctttttcatccgtaatcggcgcatccgtcaccgaacgcacggctccgcttgttccgatcgtaacggccacttcgcctttgccgatcgcgccgactccaaggttggcgagcacgccgtcatttgcgccgataataaacggtgtatccgcatgaatgcccatccgtgcagcgatttccggcgcaaggccgcgcagctgatgagtggtcggcacgatgtccgacagctgatcttcccggattccggcaatccggagcgcttcttcatcccaggaaagcgtatctaaacggaacagccccgttgccgaagcgatcgaataatcgacgacataagttccgaaaaactcgtgcagaatatattctttaatactgatgaatttggcggttttcgcgaatgtctccttgtcctgttctttcatccacacaattttggaaagcggagacatcgggtgaatcggcgtacccgttcttttataaatatcaaaaccgttcatctcttttaaaatccgttttgattgctcggcgctgcggttgtccgcccaaatgatgcttttggtcagcaggccgccgttttgatcgacagctatcaatgagtgcatggcggtgctgatgccgattgcaagcagattgtcagggctcagtccggcctttgtgacggcgtccctgatgcttccgatcaccgcttccaaaatgtgctcaggatcctgctcggcccatgccggctttggctgtattaaatcatagtgaaccgaatgcttggctaacactttgcctcttggtccgaacagaacggctttcgtactggtcgtgccgatatccagaccgataacagcttgggtttccttcataatatatcccgcctaatctgattgaataataagatagattgataatgtatgcccttacaaagtcaattataggaataatttttttataaatcaacgatgaagaagaaaaattttttcataaaattgcctcaattcccgctgtatcggcattttctcttttgaaaaataaatattacaaacgtttgtgcgcgatcatttttctgatttgctgcaagttggcgagcgttttctcctgccgcagccgggccgtggcgaaatacagtgtatcaatgaccgacagctgggcaagccttgcggacatcgcttccgttctgaaagccgtttcccttgttgacgtatacagcaccacgtcggaaatctgggtgagcggcgacttttggtagctagtaatgccgatcgtgccggcgccgagcgatttggccgttttcaccgcgtcgagcacgtccttgttgcttcccgaatgagaaatgccgatgactgcgctatcgggaccgagaagacccgctgacatcgcctgaaagtgagaatccgtgtgcgcgatgcaatttatacccgtacgcataaatttatgatacgcgtctgtggcgatcagcccggaaccgccgtttccgtaaaattcgattctgtctgcgcggtggatcatttctaccgctttttcaacatcggccggatctaataattgaaaggtatcggtcagcccggaaatgtttgtgcggaaaactttccggatgatgacttcgatatcgtcgtcggggctcatttcttcatgaatgtgctgcaccggctcctgaacgatctcctgagcaagcgcgatttttaaatcctgatagccggaaaaaccgagccgtttgcacagcctgaaaatcgtcgcttcagagcttttcgttttttccgccagctgaatgatggaaaggtgaatcacgtctttcggttccttcacgatatggtctgcaatcgctctcaattttggcgacaaacctttgctggccgcctgaatcttcccgatgctgcttgaattcacaggggtcatgctataacctccctactcgaatgtaaacgcatacttttatgataaagcaagttctgtcataagggaatcaggttttgttttctttaccgcaaatgaaagaaaagagaaaagtatatcggggacaccgcctcaatgaaacttcatacatccgattttcacaaaaagtgatcgttctctgaaaagtgccggtgcccaattcgccggccataagtgtaagctgtcctgttacagttcagtttctagtgagttgccggcgcttgaagttccggatgaatttcttcaaattagtgttccgccattagcagtcagttctttattaactggattgatcaaaagagaaggattattaagcaggagaacacttgagaaacacaggcctaatcagtttctggagaaaaacttcaaattaatataataatctaattgctctgaaacgcgtaccatacattatactttcaatgatttttaaactctgaggaggaaattcacatgaaagtaattgcaattgacttagatggcacgctgttatcagagaacttaactatccaagaacaagatgtaagagctttaaagcttggacaaaaacaaggtcatcttgtaacaatcgctacagggagagctttatttgatgcaaaacacatcatcaataaatatgatttggattttccgattattgcttcaaacggcgctcaaattgatgtgggaaatcaggtaatattcgaacattttatggattcagatgtaatccaacctatcatcacttggttaaataaagaagaaatctattatcagctctatttatctgacaaaattgccgtatcaaatcaaggaattcagcagcttgaaaaagaactttacaatacagtaatggaagaacctcattttaatcaagaagtattttggaattctattaaagctcaaatccatcaatacgggttagaggaaataccgggtacaattgaccctatcgattatcggtatgtcataaaatgtatgatcgtttcgccaaaccaaagaaaattaaaaaaagctaaagaatattttggacaactgaaggagtgtgccgtaacgagttcaggagcattcaatcttgaaatcacaagtgcaggagtagataaaggagcgtcattaaataaactttgtgaacattatggaacggatgcgcggaatgcaatcgcaataggtgataatttaaatgatctgcctatgtttcaggcagcaggaatagggatagccatggggaatgcagataagaagcttattcaattggctgcttttaaaacgttatcgaatgatgagtgtggtgtatcttatgcttttgatcattacattctgacgaaagaagaagaccctaaaccgcggagtatacagccatgagccattttgtgaaaagatgtttaatctatattgccggattgtttattttatccataggggttgtatgtatgattaaatctaataccgggattgccccctgggatgctctaaacgtggctttatcagaaataattggccttacaatcgggtcatgggttttcattgtcggaggaatccttatctttataaacagcctcataaaaatgcggtttcctaatctagccggttttattccgatttttattattggaagttttgttgaccttttaaacttaaaggttctttcgttcttaaaaacagattctgtaattcttcaatggagtttatttttgatagggttgtgtatattggctatgggaatcgctatttatttaagagcatcttttccttcgataccgaatgatgaattaatgttggctattactgaacgtacaggttggggtattaatattacaaagacgataggggaagctttagcttttgtgcttgcaatcattcttcaggggccgattgggataggaaccatcattgtgctgctatgtctggggatattagtaggtttatttgacaaactattacacaagatggggaagccccgttctatttatagtgtgggacaggaaggcgcacatattcatgcaggccatgataaaactattatttaaatgctttttttccccttgtgttattcagtgtgaaatcctgataacgctgtctaagaaggagtaacagtaatgacaaacattacagagatagcaaagaaagcgaacgtttcccggacaacagtttctagagttctcaataatcatccttatgtaaaacctgagaagcgggacgctgtgttaaaagctatgaaggaattaaattatgtaccaaatttcaacgcgattaacctatccagggggaagacaaatgtattcggagtcattgttcctaaaatcaaccatccgtttttcagtaaactgattgccggaataggcgaagagtgtaataaacataattacagtttgcttgtgcaccaatcaaataacgatcctgaacaagaaatggagttttttaacagattgaaatacaaacttattgacggtcttattttgggatcctgtgtaagcccccatcacgtactcgacgagatatctgggtttggcaatattgtttcctgtgaagcttctgcaagcaaacaggttgcacatatatttattaatcatgagtcaggaatcaaaatggcaattgatcatctgcgaaatcaaggacatcaatccattggtctatgtataggaaatcctaagagcggtgttggcataagcagaaaaaaatcattttttcactttcaaaatgaatacggattgaaatggagtgataattggtactttgaggaacagtacactattgaaaatggtatagaaatagcaaaattattactaaataagtcacctcgtcctgaggcaatggttgtaggaagtgattatgttgcggcagggatcatttatgaagcgaaaagacagggaatacgaatacctgaagaactggcgattataggatttgataatcagccgatatctaaggtaatagaactttcaacgatacatcaaccgattaaagagttgggacaaacagcagcaaatttattatataacttaatgaataacaaagatgtccccaatataaataagttgaacctaaaacttattaaaagaaagtcaacttaaaaagaccactttatggtggtcttttttgcttagcgcagaatcagctctggggcaggcgctttgaaatgagctctttttttcgtttcatctataaaactgaagggcttcatggaatcgtagaagcttttcggaatttctgtttgaacaatatatataaagtgctgattacgccatattaggggccggctcaccccgcatatgaatataaacatggtcagtcaaaatgtcttaaataggtgataagaaaaccagcggcaaaaattagtattgactttgaaaatagaagactgtatattatgttactatattcagaaaataaaaactcaagagattcatttaacataaaacactgtgaacgggagcagtaaaagaatccagtcagaaaaagagagccgcgggttggtgcaacgcggactgattgttctttgaactcgcccggaagtggcagggcggaacggaattgtcggaatattccctatgtcctaacggctgaccttcgttaaaaggtttttaagctggattccggatattcgggatcaacaagagtggtaccgcggctgcctgaggcacgccgtctcttttcccaaagaggcggcgtgcttttttatgtgatgaacactttttgcgagagggcgtgtgatagatggaaaaggacaagcaaacattaaaacggacgatgtcgtccagacacattatgatgatggcgcttggaggcgcaatcggggccgggctctttaaaggcagcagcacggcgattgatgaagcggggccatccgtgttattggcctacctcctcggcggaatcattctgctgtttattatgcaggggctggccgaaatggcagtcagaaacaaacatgcaaggacgttccgtgatttggttcagcagtctctcgggtcgtacgctgcatactttttagactggatctattggaaaatgtgggtgctcaatattgccgcggaggcggtcgtagccgccattttcattcaatattggctgccggaatgtccgatatggatattggctttgatcatttccattgtggtgacggtcgtaaacatgctttctgtgaaactgtttgccgagacggagtactggctcgcgctcattaaaattacagtgattgtcatctttattttatgcgggattctgctattatttttctcattcggcaatcacacggcgccggggctgtctcatttaacggatcacggagggtttttcccgcatggagcggggggcgtcattacggcgatgctcgtcgtgatctactcatacggcggaacggaaatcatcggcgtcacgctggcggagacaaaaaatcccgaaaaggtgatcccgaaagctgtccgaagcacgttaacgcggattgtcgctttttacttgctgccgtttttcatcatcgtcagcctgattccttggaatcaagtcaacagcgttccggaaagcccgtttgtcatagtatttaagatgatagggattccgggtgccgaccatattatgaatgccgtcattcttcttgcgattatctcgtctatgaactcgggactgtacggatcatcccgcgtcttgtttacacaggcttctgacggccgggtgccgaaaatcttttcaaaactgtcgaagaaaaaggttcccgtttatgcgattctgacttgtacgtcatttttatatgtaggcgtcctgatttctttattcgcaggaagccagacgtttaattatttgatgggttccctcggctataccgtgctgttcatctggctgattatcggattcgcccatttgaaatcaagaaaacattcaacagaacaaccggcttattacgtcaaatggttcccgtacacgacatggttcgcggtgcttgcgcttttggccatcttggtcggcgtgattgccacgacatccatcgtcattacatgcatcactgcggccatctatctcctcattacggctgcgtatctcgtgaaagggagacgtcaataaataaaaaaactcttgccccgcggcaagagtttttttaatgaacggcctttttttctgcggccagagcaggtgttttcagtttcttcggtgttatattcacaaaacaaatgcttgtgacgatcagaagcagtccggctaaaaggctgacggtcagcggctcatgcaggaatatcgagctgacggtaatggatatgagcgggatcaggaaggtgtaagaggcgaccttgcttgcttcccctgaaccgacaagcgtaaaaaaggcgagccagccgagcgcgataacaaaaactgaaatgaacagaaggctcagaatgaacggagctttccattgaatcgctgaaaagctttctgaaaaatggccggagctgacaagcagcacgccgccgatcagaagctgaagagcgaccatccagatagaatccgcgcgtccgcccgttcttttcacatataccgtgccgagcgcccagctgaccgcggagcctaaggccaaaagaatgccggcgatggaaatatggcctccgaaaccggctgcgctgatgacggcgacaccggcaaagcccagaataagaccggctatttttaaaggatacatcgattccccgagccacagccaagaaaaaacgcccattaacaccggctggaaaaacacgatggctgaaaataagccggcaggcaggtaattcaagccgaccgtttgcaggccgtaaaataaagtaatatttaaaatggcagaaataagatagatcggccacgtttctttaaaacgcagctttttaaaacggggcagcgcaaccattaataatagaagtccgccgatcagcgtgcggattccggcaaacagaaggggcggcgaataggcaagcgcggcctttgtcagcggccagttaattccccataccgtgactagaaacgccagcataagagccgtctgtattttcgaaagctgtttcacgtcgttcactccttgtagaacaattccatcatatgatacggtaatcagtaagataaataaaatgaatcttttttataaggagcataagtaaaacgttatgacgattacacaactgcgggtttttgttcaaatcgctgaaacgggaagctttacaaaagcggggcaggcgctgaatatgacgcagcccgccgtcagccatgccatctctgcgcttgagtcagagctcggcatcaagctgatcgtccgcgagcgccgcaacggcgtaaggctcacggacacgggcggaaaaattctcgtccatatcagagaggtgctcaaaggcatagaaaaagccgagcagctggcggcagcggaaagagggcttgaacagggaacgattcacatcggcacatttccggccgcttccgcttatttcattccaaagctgatcagcgtgtttaaaaaacggtatccgaagcttgagttggtgcttcatgaaggaacggttaacgaagtaaaggaatggctccgctcccgggtaatagatgtgggtatcactctttttcctacggaagacatggaatatctgccgctgaaaaaagataaaatggccgtcgtgcttagaaatgatcacccgctttgcaactgtgagtcaatcactctgaaagatcttgaccgccagccgatgatcatctgtgacggaggatacgaatcaccgtttattgatatgtttaaggaggcaggatctgaactgactgccgcattcactgtttacaacgtcaatacgtccatcagcatgatcaaagagggactgggaattgcgatattatcacaaatgtctatgtcgggaatatcgctgccggaaaatgtcgtgacaagggaactcaatcaggcggtgtaccgtgatgttctgcttgccgttccttctataaaggaggcttcattggcggcaaaactttttattcaaatcgcacaggaactcacaaagaacgaataaaaaaagaccctaatcatcatagggccctgaatcttatcggttaattttaaaagagttagtcgtattgacaagttttgaaccgctgaacgtagctttgacacgataataacctgtcttgcatccttttaaagagaatgacttagtcacccttactgagaaagaaaaggttgtttttttacaagtcgtccatttctttccggactttcgctgtaagtataggtttcctttaaaagttcgatctgacggatacgctgtactgagagtaaaatcgacacttttcgcttttttagtgtagtaggaggcatcggtaaatccgcttacatttaaattctgctcagtgccggagtaaaagtctgcggcatatgccttatcggtgtttcctgtaaagaagattgctgccagtaaagctgttgtgagtgccattaagatttttttgcgcatatagactatgacttccttcctattcaatatcatacatatcttaacattattgggtttgttctttcaacgatagattttcacttttataggatgaaaagctcgtcatatctgaatgtaatagattcattcatacagagttcactagtgacgaccgctgactgattgttcgaagatcatcgaatcaaattgtttaactcacgggaaaagctgtggtaaggtgtgtggtagagaccttgtttaagatctgcttacactaaaccataaaggagaaaacgatggctgaacatacattgaaagatactgcgttttccgtattgaatttatcgccggtcgtacaggggggaacggttgctgaatcgttccgcaacagcatggatttagcgcgccgcgccgaggagtggggctataaccgctattggcttgcggagcatcataatatagaaggcgtcgccagctcggcaacggcggtgctgatcggccacatcgccggcggcacgaaaaaaatccgcgtcggttctgggggtattatgctgccgaatcattcttcacttgtgatcgcggagcagttcggaacccttgaaacgttatatccggggcggattgatctggggctcggacgcgcgccggggaccgaccaattaacggcgagagccttacgaagaaacataaacagcggggaagattttccggagcagcttgaagaattgagaaattacttcaaaccgacaggcaatgtgcgcaatcaagtccgcgccattccgggcgaagggctggacgtgccgatctggcttttgggctcaagcggcttcagcgcgcgtcttgcgggagagctcgggcttccgttcgcctttgcggctcacttctcaccgaaaaataccgtgcccgctcttgaactgtaccgcagctccttccgtccgtcagacgtactggatcaaccgtacgcgatggtcggcgtcaccgtcattgccgccgatacggatgaaaaggcggagcatctggcaacatcgcattatcaaagatttttagacctcgtccgcggcacgccgaaccagctgaagcctcctgttgaagacatggatcaaatctggtcgccgtatgaaaaagcgatggtcaatgatcagctcagttcaacgatcgtcggcggaccggagcgtgtgaaggaaaagctggaaagcttcatccggacaacacaggcggatgaaatcatggtgaattcagaaagctttgagcatgccgacagaatgagatcatttgaaatcatcgccgaattaaaaaacagctgagcaaaaaaagcaatgtgccgcgcacattgctttttttattcgccgatccgcttgactgaattccggatgacgagttccggttcatacacgacgtcatccttcttcggctttttatgttctaagcagtcgatgacatattttgccgccgctttccccataatggatttcggatgcttgacagaggtgagtttcacctcggaaatctgggcgaaatgtgaatcgtcatagcccatgaccgatacgtcatcaggcacctttaacccgatttccctgagaagattaatcgtcttcagcgcaatttcgtcattgtagcaaagaatggccgtcgggtatgatccgctgttttgctcaagggtatgcttaattttttggagaagcacggtttctttttcctcagtcgtgtaagtcacgatcatgtccggagacgggaaaatcccgcgctcccgatgcgcctgaagatagccgttcatccgtttgacgccctgcgtgtcatccgctttaaagattcccataatgtgcgtgtggccgagggacatgacgtattcgcaagccatcatgccgcctttgacatcattgacggaaaagctcggggcggccagctccgcataagaggcgttaatcatggcaaacggaatgccgtttttctccagattgagatagtagccgatgttgggcgtctgcagcgcgctttttgtaggctcgacaatcagcccgtctatatttttggacagcaggttttcaaggccgcgccgctcactttctgtattgttgttggtgctcgtcagcagcatggaatagccctgttcgcttaaataagattcaattcccctgatgatgctcggaaaaatatagtctgatatgtacgttgtaatgacgccgatcgttttgtttgaatgcatggctgatttcgccgtgcgtgaagcgacaaaggtgcctccgccctgaacgctgtacagcagcccttgcgagaccaaatctccgatcgcctttctgatggtatggcggctgacgccgaactgctgcatcagctcattttccgtaggcagcttttcgtccggctgtatttttccctgattcagccatgaacaaatttcttcttttacttgagcatatttcggtagcatatcaattcctccaaaatgtatacggacaaattccagtataacatagtaagccctttcatcaagctgtaaaaataattgacagattatgaaaaactgcttattctttatttgtacgtactaattttccttatttttagataaaattctttataagtacgtacaaatgtggcggttctgaagaaaacaaagcaacatcaagcgccgcactctgttttgtaagcgtttttattctatttttcgcgggagggtaaaattcatgaagaatcacccggcaccaattggctcaaatgtacctgtcactcggcagcattccaagtggtttgtcattctcatctcatgcgcggccggactgggagggcttttgtacggttatgacacggcggtgatttccggcgccatcggtttcctgaaagatttgtaccgcttaagtccttttatggaagggctcgtgatttcaagcattatgatcggcggtgttttcggcgtcgggatttccggatttttgagtgaccgtttcggacggagaaagattttgatggcagcggcgctgttgtttgcggtgtcagcggttgtctctgcgctttctcaaagtgtgtcttccttagtgatcgccagagtcatcggcggtctgggaatcggcatgggctcctcgctttctgtcacgtatattaccgaagccgctccgccggccatacgcggcagtctgtcttcactgtatcagctgtttacgatattagggatatccggcacttattttattaaccttgccgtccagcagtccggctcgtatgaatggggggtgcacaccggctggcggtggatgctcgcttacggcatgattccgtccgtcatcttttttatcgtgctgcttatcgtgccggaaagtccgcgctggcttgcgaaagcggggcgccggaatgaagccctcgccgtgctgacgcgcattaacggcgagcagaccgcgaaagaagaaatcaaacaaatcgaaacgtctttgcaattagaaaaaatggggtcattgtctcagctgtttaaaccggggctgagaaaagcgcttgtgatcgggattctgctggctttattcaatcaggtcatcggcatgaacgcaattacgtattacgggccggaaattttcaaaatgatgggcttcggacagaatgcggggtttatcacgacatgcatcgtcggtgtcgtcgaagtgattttcaccgtcatcgccgttcttttagtggataaagtaggccggaaaaagctgatgggggtcggatctgcctttatggcgctgttcatgatcttaatcggggcagccttttattttcagctggcgagcggtccggctttagtcgtcatcatattgggattcgtcgccgctttctgcgtgtcagtcgggccgattacgtggatcatgatttcggaaatctttccgaaccacctccgcgcacgcgccgccggtattgcgacgatattcttatggggggccaactgggcgatcggccagttcgtgccgatgatgatcagcgggttagggctcgcgtacaccttctggatatttgccgtcattaatattctctgtttcttgtttgtcgtgacgatctgccctgagacgaaaaataaatcattagaagaaatagaaaaactctggataaaatgaaagcgttttacgacaaaagtctgctccggcgggcttttgtctgtcaccttcattccgtttctgtatataatgactgtatcaaggagatactggaaaaccctgcgaagaatgtcgaggaattgacctttaacagttgaattaacaatgtcatcctgttaaaataattaaagaaagcagacataattttttttggctatgatgggacgttttttgtcatagcgggacattttttgtccagtatgaataggaaggaacgtttgagtcatgaaccagttaatacaagctcaaaaaaaattattgcctgatcttttgcttgtgatgcagaaaagatttgaaatcttgcagtatatcaggcttaccgaaccgatcggccgcagaagtcttgcagccagtctcggattgaccgagcgcgttctcagaagcgaggttcagtttttgaaagaacagaatctcatcgatattaaaacaaacggcatgacaatgacggaagagggctattcactgctttcgattctggaagatacgatgaaggatgttttaggattgacgcttctggaaaagacattaaaagggcggcttaatctgaaagacgccattatcgtttccggagacagcgaccaatctccttgggtcaaaaaagaattagggagagcggccgttgcatgtatgaaaaagagattttcaggcaaaaatatcgtcgctgtaaccggcggtacgacaattgaagccgtcgccgatatgatgacgccggattcaaaaaaccgcgagctcctgtttgtgcccgcaagaggcggtttaggcgaagatgtgaaaaaccaggcgaacaccatatgcgcgcatatggcggaaaaggcttcaggcacttatcggcttttgttcgttcccggacagctgtcacaaggcgcctactcatctattattgaagaaccttccgtaaaagaggtgcttcacacgattaaatcagcgagtatgctcgttcacggaatcggcgaagctagaacaatggcggagcgaagaaacacgcctttggaagatttgaagaaaatagatgacaatcatgcggtgacagaggcattcggctactactttaatgcggacggagaagtcgttcacaaggtgcattcagtcggaatgcagctcgatgacctcgatgccattcccgacattatcgcggtagcgggcggatcatcaaaagcagaagcaatcgaagcttattttaaaaagcagcgaaacacggttctcgtcacggacgaaggagccgcaaagaagttattaagggataacagtccctcaatataaatatctctcacttatttaaaggaggaaataatcatggcagtaaaagtcggtattaacggttttggtcgtattggacgtaacgtattccgcgcagcattaaacaatcctgaagttgaggtagtagcggttaacgatttaacagacgctaacatgcttgctcatcttttacaatatgattccgtacacggaaaattagatgcagaagttaaagttgacggcagcaaccttgttgttaacggcaaaacaatcgaagtttctgctgagcgcgatcctgcgaaactcagctggggcaaacaaggcgttgaaatcgtagttgaatctactggtttcttcacaaaacgcgcagacgctgcgaaacacttagaagcaggcgcgaaaaaagttatcatctctgcacctgctaacgaagaagatatcacaatcgttatgggtgttaacgaagacaaatacgatgcggctaaccaccatgttatctctaacgcatcttgcacaacaaactgccttgcgccgtttgcaaaagtacttaacgacaaattcggcatcaaacgcggtatgatgacaactgttcactcttacacaaacgatcagcaaattcttgatcttccgcacaaagactaccgtcgtgcgcgtgcagcagctgaaaacatcattcctacatcaactggtgctgctaaagcagtttcccttgttcttcctgaactgaaaggcaaactgaacggcggagctatgcgtgtgccgactccaaacgtttctcttgttgacctagttgctgaacttaacaaagacgtaacggctgaagacgtaaacgcagctcttaaagaagcggctgaaggcgatcttaaaggaatccttggctacagcgaagagccattagtatccggagactacaacggcaatgctaactcttctacaatcgatgctctttctacaatggttatggaaggcagcatggtaaaagtaatctcttggtacgataacgaaagcggctactctaaccgcgttgttgaccttgcagcttacatcgcaaaacaaggtctttaattcatagctcccggaaagggccggacttggttctttcggacagaaacgctataatgaaagcggacaagggaaggggacggactccctttccctttttccatgagaaccggctttcagaaagcgccggattgctgcagaacgtccgcgttttgaagtttccgcggcactttcgttttctgagccgcctgccctggctcagaagacgatctgccccgtgcccggaagctgcaatctgcccccgcggcggaagcatcatgaggcggtttcacgtttcacgtttttcgtgctatgcaaaccattttgaaggaggatctcctaaggcatgaataaaaaaacagtaaaagacatcgacgtaaaaggcaaagtcgtattctgccgcgttgactttaacgttccaatgaaagacggggaagtaacagacgatactcgtatccgcgctgcgcttccaacaatcaaacaccttgcagaccaaggcgcgaaagtccttcttgcgagccacttaggccgcccgaaaggcgaaacggttgaggagcttcgtttaactcctgtcgctgcacgcttaggcgaactgctcggcaaagaagtgaaaaaagcggatgaagcttacggcgatgctgtaaaagcacaaatttctgatatgaaggacggagacgttcttgtattggaaaacgtacgtttctaccctggtgaagagaaaaacgatcctgagcttgctaaagcatttgctgagcttgcggatgtatatgtcaatgacgcattcggtgctgcccaccgtgctcacgcatctacagccggaattgccgagcatctgccggcggttgcaggattcctgatggaaaaagagcttgacgttctcggcaaagccgtgacaaatcctgagcgcccgtttacggcaatcatcggcggcgcgaaagtaaaagacaaaatcggcgtaatcgaaagtctgcttgataaagtggacaacttgatcatcggcggaggtcttgcttacacattcgtaaaagcgcttggctatgaagtcggtaaatctcttcttgaagaagataaaatcgaacttgcaaaatcattcatggaccgcgcggaagaaaaaggcgttaaattctatatgccggaagacgttctcgttgctgatgatttctctaacgatgcaaacgttcaaatcgtgccgatctctgagatcccaagtgatttagaagcgatcgacatcggaacgaaaacccgcgaaacgtatgctgaagttatcaaaaacagcaaacttgtcgtatggaacggaccgatgggcgtattcgaaatcgacttgttcgctcaaggcacaaaagcagtggctgaagcattggcagaggcaaacgatacatactctgtcatcggcggaggagactctgcggcagccgttgaaaaattcggccttgctgacaaaatgagccatatctcaacaggcggcggcgcatcccttgaattcatggaaggcaaagagcttccaggtgtagctgcgctgaacgataaataaaaactgctataaggaagtggaacagatgagaaaaccaattatagccggtaactggaaaatgaacaaaacactcggcgaagctgtcagcttcgttgaagaagtgaaatcttccattccagcagcagacaaagcggaagccgtcgtttgcgcaccagctcttttcttagaaaagctgacttctgctgttaaaggaactgacctgaaagtcggcgcccaaaacatgcattttgaagaaaacggtgcgttcacaggtgaaatcagcccggtcgctctgaaagaccttggcgtggattactgcgtcatcggccactctgagcgccgtgaaatgttcgctgaaactgatgaaacagttaacaaaaaagcgcatgctgctttcaaacacggcattgtgccgatcatttgcgtaggtgaaacgcttgaagagcgcgaagccggaaaaacaaatgatcttgttgccgatcaagtgaaaaaaggtcttgcgggtctttctgaagagcaagttgccgcttccgttattgcgtacgagccaatctgggcaatcggaacaggcaaatcttctacagcgaaagatgctaacgacgtctgcgcgcatatccgtaaagtcgttgctgaaagcttcagccaggaaactgctgacaagctccgcattcaatacggcggcagcgtaaaacctgcaaatattaaagaatatatggcagagtccgatattgacggtgctttggtcggcggcgcaagccttgaaccgcagtcattcgttcaattattggaggaaggtcaatatgagtaaaaaaccagctgcactcatcattcttgatgggttcggattacgcaatgaaacagtcggaaacgcagtcgcacaagcgaaaaaaccgaatttcgaccgttattggaaccaataccctcatcagacgctgacggcatcaggcgaagcagtcggactgcctgaaggacagatggggaactctgaagtcggtcatttgaatatcggcgcaggacgtattgtgtaccaaagcttaacacgcgtgaacgttgccatccgcgaaggcgaatttgaacgcaatcaaacgttccttgacgccatcaaaaacgcgaaagacaacgacaaagcgttgcacctgttcggccttctttctgacggaggcgtacacagtcatatcaatcatttattcgcgctgctgaagcttgcgaaaagtgaaggactgacgaaggtgtatattcacggtttcctcgacggccgcgatgtaggtccgcaaacagcgaaaacttacattcagcagctgaatgagcagatcgaagaaatcggtgtcggcgaaatcgccagcatttccggacgctactactccatggaccgcgacaaacgctgggaccgtgtggaaaaagcgtaccgcgcaatggcttacggcgaaggcccgtcttaccgcagcgcgatggatgtagtcgacgattcttatgcgaacggcattcatgatgaattcgtcattccgtccgtcatcacaaaagaaaacggtgaacccgttgcgaaaattcatgacggcgattctgtgattttctataatttcagaccggaccgcgccatccagatttcaaacacgtttaccaacaaagatttccgcgatttcgaccgcggtgaaaatcatccgaaaaacctgtatttcgtctgcctgactcacttcagtgaatctgttgacggatatgtggctttcaaaccggtaaaccttgacaatacggtcggtgaagtattagcacagcacgggttaaaacagcttcgcattgcagaaactgaaaagtatccgcacgttacgttctttatgagcggcggccgcgaagaagaattcccgggcgaagagcgcgtcctcattaactcgccgaaggtcgcgacatatgacctgaagcctgaaatgagcgcgtatgaagtgaaggatgctcttgtaaaagaaatcgcggctgacaagcacgacgcgatcatcctgaactttgcaaaccctgacatggtcggccactccggaatggtcgaaccgacgattaaagcaattgaagcagtggacgaatgcttaggcgaagtggttgacgccatcatcgctaaaggcggacatgccatcattaccgctgatcacggtaatgcggacattctgattacagaaacaggcgaaccgcacactgcccatacgacaaacccagtccctgtcattgtgacgaaagaaggcgtgacgctgcgcgaaggcggaatcctaggcgacctcgcaccaacgttattagaccttctcggtgttgaaaaaccgaaagaaatgaccggaacatctttaattcaaaaataagcgtaaatcaaaaggagagacaaactcatgccatacattgttgatgtttatgcacgcgaagtccttgactcacgcggcaacccaacagttgaagttgaagtatatacagaaacaggagctttcggccgcgcattagtgccaagcggagcttctacaggtgaatacgaagcggttgagcttcgtgacggcgacaaagaccgttaccttggaaaaggcgtgttaactgctgttaacaacgtaaacgaaatcatttctccagagcttctcggctttgacgtaactgaacaaaacgcaatcgatcagcttttaatcgagcttgacggaactgaaaacaaaggcaaactcggtgcgaacgcaatccttggtgtatctatggcttgtgcgcgcgcagctgctgatttcttacagattcctctttaccaataccttggaggattcaactcaaaaacgcttcctgtaccgatgatgaacatcgtaaacggcggagagcatgctgacaacaacgtagacattcaagaattcatgattatgcctgtaggtgcgcctaacttccgtgaagcgcttcgcatgggcgctcaaatcttccacagcctgaaatcagttctttctgctaaaggaatgaacacagctgtaggtgacgaaggcggattcgctccgaaccttggttctaacgaagaagcgcttcaaacaatcgttgaagcaatcgaaaaagccggcttcaaacctggcgaagaagtgaagcttgctatggatgctgcatcttctgagttctacaacaaagaagacggcaaataccatctgtctggcgaaggtgttgtgaaaacatctgctgaaatggttgactggtacgaagaaatggtttctaaatacccaatcatctctatcgaagacggacttgacgagaacgactgggaaggccacaaacttcttacagagcgtcttggcaaaaaagttcagcttgtcggtgacgaccttttcgttacaaacacgaaaaagcttgctgaaggtatcaaaaacggcgtaggcaactctatcctgatcaaagtaaaccaaatcggtacattgactgaaacattcgatgcgatcgaaatggcgaaacgcgcgggctacactgccgttatctctcaccgttccggtgaaactgaagacagcacaatcgctgacatcgctgtggcaactaatgcaggacaaatcaaaacaggtgctccgtcccgtacggaccgtgttgcgaaatacaaccagcttcttcgcatcgaagatcagttggctgaaactgctcaataccacggtatcaactctttctataacttaaataagtaatggaatggacgccgggagaatatctcccggcgtttttttatggtcccgggcttttccctcctttttctccatcttcatttggtcaataatattcattttccccctttttaaaggaatcagtgttcttcaatcgaaagggaagaggtgttaataagaggagggattatgatgaaattttcatttatgtcagccgcggtggcagcaagcgtcatatggggcgcatctgccgggccgctgtccgaaactcatgcttattcaactgtgaccgcgccggtttttgatgctgatgaggcattggacactatgcgtgatctgagtgaaaccatcggtccgcgggaaaccggaactgcgaaagaaaaggaagcggctgaatacatatcgaatcgtctgcgggctcagggcgccagtgtcaaagtacaatcatttcctttgaaaaagtacttttcaggttcagtcacagcgggagatcatgaattcccgctccgctccgctgatcaatccgctgttgaaaaagagctcaaaatagaaggcgggatttttgacggcggctgcggatcacgcaatgacgtaacaggagccaaaggaaaaattgcagtgatacgcgaaggaaagatccccgtttctcaaaagatcaaacatgccgaacaagcgggagccaaagcagtcattatttataatcagacaacaaaaccgctcgccgtccgtccgcataccgataaaggaatcacgataccggcagcgggtatgaaaaaagaagacggtgaagcattgctgcaggaaaagcaggcagtcattcaatttaaaaactataaaaaccgcacctcacaaaatatcataggaacgcgcaaagcggcacaggccgacccttctgatgctgatattatttatgtcacagcgcattatgacagcgtaaaaggcgcgcccggagcggatgataacgcctcaggcacatctgccgttctggaaatcagcaagcaattgacacacataccgaaagacaaagagatccgctttatcctgttcggtgcagaagaattatggtctgcgggttcatcttattacgtcagtacactcacgaacaatgaaagaaagcacagccaggccaattttaatgccgatatgattgcgactgactgggaagaagcgagtcaaatgtgtgtcacgactcctgacggcagggaaaacccgagtgtccggtacgctgaaaaagccgctgaaaaatcccggttggtcaagccaaacctgattcagctcggttactcagaccatgtctctttttatgaagcggggattccgtcggctaactggatttggctcagccccgatacacaggagccggggccctggtaccacactgagaatgataatatgaaacacatcagcaaagaacggctagagaaagccggggcactcgtttccgcagcagtaactgaggcaatgaaagaataaaaaacaggcttcggcctgttttttatattattttctgtatattctatcaattaagggagattttctcactcgttaccagatatataccatttaacaggattttactttacaaataaaagaaaaataaatagataatacctaattcacaaaaggatgtaaaactcatttatcaaattttaacttttgttataattgcgatatcgatcgatatttgttttaaattgtaaaaaacaatactcttttctatctattagggggcgaaaaatgaatactgtcacaaaagaagccagcaaccttggtcaaaaacggctgttacatctgattgaaacgaagcaggcgatagtaggcgtgttaggcatgggatatgtgggatttcctcttgcgctggaatgtgtcgataaaggatacaatgtgatcggattcgacaaaaacagtgaaaaggtttccttgttagccgccggaagcagccatattcaagatatagaggacggcagactgaactcggctttacaaacagaacgctttcaaatcagcgccgacatgtcgctcatccaaaaatgcgacatcattgtgatatgtgtgccgacacccctgaacaaaaaagacaagatccccgatttaacctacatcgacagtgcagttgacagcatgatcgcttatggaaggcagcatcagcttttaattttagaaagcaccacctatcccggaacaacgaaaaaaaagattgccgacagaatggcatcaagccgcggcatgaaaataggaacagacttttttacggcttattctccggaaagaatcgatccgggcaacaggcaatatgaagtttcagatattcctaaagtagtcggcggaaccacacagacttgcacagaacttgcctcagcgttttacagcaccattgttacaagcattcacccggtcacctcacccgaagtagctgaaacagctaaactcctagagaatacttatcgttatgtcaatatagctcttatcaatgaaatggcgcttaattgccgtgaactcgatattgatatatgggaagtcatctgcgcggcggacacgaagccgttcggctttcaaaaatttatccctggccccggagtcggaggccattgtatcccgattgatcctttttacttcaaatggatcgcgaatgaaaaagggctgcagacaaaattaattgatctggcggacgaaatcaattctaacatgccgatttctgtctctgactatgctttgaaactggcgggcaaagacaaatgcagcatcttaataataggggccgcttataaaaaaaatacaaatgacccgcgtgaatcctcagtgtttacgataatggaagaattgatggacaagggatgcgcgattgattatcatgatccgtttatcagcgagatccgcttgaatgacggaagccgcaaacaatctgtccctttcacaaaaaaacaaatcaatcagtacgacgtcatcatcattcatacagatcacgatgtaatcgactacagtattttgaaggatgcctcaccgattatctttgacacaagaaatgtatgcaaggaaaaatcagccgacaattgcagagttgtcactttataaggagggaacggtcattagtaatcgatttatctcttttcacagacctgatatgacaaacgaagaaatcgcaagcgtaaccgaaacgattcagtcgggctggatttcgaaaggcccgaaggtaatcgattttgaaaaaaagctgggagaatgtataggagccgaacacgtcatcagctgtaattcaggaaccgctgcattacacatggctttattggcgctcggtgtgggagaaggcgatgaagtcatcgtgccgagcttcacgttctgttccagcgtcaatgtcatcctgcacgccggagccgttcctgtgtttgcggatatatgcgagaaaagtctttgtgccgatcctgaagatgtcaggaagaaaataacgccgcgcacaaaagcggtaattgcggttcattttgccggctatccggctgatctggaaaacttgcaatccatttgtaaagaaaacggattgtatctgattgaagacgccgctcatgcgctcggtacaaaatataacggaagcatgatcggcactcatggcgatgccgtgtgcttcagcttttatgccaccaaaaatattacaacgggggaaggcggagccctcgtcatgaaagacgaacaggccgcagaaagagcgaggctgtacggctggcacggcatcacaaaaaatgcctggaaccggtacggtgaaaaaggcagctggagatacgacgttttactgccgggctttaaatataatatgacggatattcaggccgcgctcggtctggttcaattgaaacgcgcaaacgaaattcaagaaaaacgggaacagatcgctcaattttatgtacgtgaactgtcaggccaatctgacaaagcggcgcttccgctttctgacattccaagcggcataacgcactcatggcatttatttattttacgcattcgagaaaacggcggtatggacagagatttgtttattgagaaaatgaaagaaaaacaaatcgggctgagcgtgcactttattcccgtgcatttgcatccttactataaaaaacattttcctgccgagcttccggtaactgaacgtgttttccgggagatcgtatcactgcctctttacagccagttatcagatgaggattgcagctatattgtcaagtctataaaagaagttttgactatcagccaggaggttggatcatgaaacatattgcgattatcggaggagccggttttatcggaagcgaactggcggcattattacaggctaaaggttatcacaccatcattgcagaccaaaaggagccggcttttgacactgaataccgccaaacggatattcttgaccggacgtccctccgcgaatcactgcggggagcggatgcagttgtccatttggcggcaatggtcggagtggacagctgccgaagcaatgaagaagacgtcatacgggtcaattttgaaggaacgaaaaacgtcactgaggtatgcggtgaattaggaatcagcacacttcttttctcatcgagttcagaagtgttcggagattcaccggattttccttataccgagacaagcagaaagcttccgaaatcggcttacggaaaagccaaactgcaatcagaggaatatttgagagaacaggcttccgacaaacttcatattcgggtcgtccggtactttaatgtatacgggccgaaacagcgcgaggattttgtcatcaacaagtttttcagcctggccgagaatggctctgagctgcctctttacggggacggcggacaaatacgctgcttcagctacatcagtgatatcgtcaccggaacttatctcgctctcattcatgaaggagccgtctttgaagacttcaatatcgggaatgaccagccgatcacgataaaagaactggctgaaaaagtcaatgtgctttcaggcagagagaaggataactatctgtttaaaaagctgggcgaagacggcgtgaggggaaaagacatcgagatttttaaacgggcgccgtcaatcgagaaggcgaaacgtttgctcggttacgctccgaaagtaagtctgaatgaaggcctggagatcattaaagatgagagacacaagtacaaactttcactttcctaaaaacccggaagtggtcaaatatcctgtttatcccggacagctttccgtcaggggccgtctgcgcgcggtgaagcacttgcttactgccggacaaagcggactgactgaaaaactggaaaaacgttacgggaaagggattgtgctgacctccagcggcagtgcggcactggtgctcgcattaacttattcgggagccgggccggggaaagaagtgattttctcatccttcagctgcccgaatgtcattgatgccgtgctgcaatccggtgcggcgcctgtgtttgcgcagctggatgagcatctatccttatcgtttgaggatgtcaaaaaaaaagtgacaaggcagacgtgtgcggttatcctcacgcatgtatacggccggagagaaaataccgctatcattgactgggcgaaggaaaacggaattgctgtcattgatgatgccgctcaagccatgtttacaaaacaagcggatacatttgccggcggtttgggcgatttcggcattttaagcttcggcccctcaaagccgcttgcgagtatcggaggcggcgcgttaatcgcgccgaaagaatggcttcggcaaaaagcaaatctcccgatggaacagcgcagccaagtggcagctgactatcgaatttatatcagaaatcaaagaatccaggctgtaatgaaacggaaacggcatcatcctatttcatatatgtttagaaaagcgggcgccatgccttccatgaaagccacaaagctcgaagctctgccggataaaccggctgttgtacccgtgcttcgcatgcatccggcaagggaagccattattgatgatcagctttcacgtatggatcagcttgtaacagcttcgctccgaaacttagagacggcgggagaagtctttgcaaaggcggaagaaacaaacggcgtaagaatgattcagccccaagaaggagaacatctgaattatttaacaattgtatttccccgggatgaagagcggtacgggtgttccgtttatttagctgaaagaggcatccaaacatgctggaactatcttcccctcggacgtattccgatttatgaaacatacgcgggggaaggcggggaagacccgctttggaagagagttctttctctgccgtttaaaccccctcttcaaaaggagcaagtcagatatatagccgaatccgttttatcatattatgagcaaaagaataagactgaatagtggtgataactatgcaaaaaacagcagtatacacgacccgccaggcatgggatcgggccgctgacatgtatcaggcgggattgtttcaaagctatgattggggaatcctcatggaagagcttcccggcacgtcatttcaccctgtcagactgacaacggacggaggacaagtcatctatcttccgctttttgaacagaagggcgtattatccggcaatatgatcggatacggcggcgttatttcagatcgccccatctcatttgaatggcttcaaagtgaaattcaggccatattcagccggaacatatcccggatgctgctgccgtacggtcagacttcttttacagaagaaatcggggaagggtggacggaaaaggcgacacggattctttcgcttccggacacgtttgacgaactttggacgggcatttccggaaaagcccggacggcagtcagatacgctgaaaaagagaatattgtcacccggctgatcgggcaaaaagaacttggcgcattttatgacctctacaaagagcatacgtcggcaatcggcgcggcttatgtactgagccagggctttttccaaaagctgcttgacacgtttgcggatcgaatgttttgggtcggagcatatcaggatgagacgctgatcagcagcagtatttttctctatgaccgctctcatttctattattggcagaatataaacagcctggcgggaaaaaaatcgcaggcctcttacttattgatgcgtgacgccctgcaattcgccatttgccgcaagcttcaatgggctgattttggctattcacacagtaaagaaatcgcaagaccgaaacgatattggggagctgaagaaaaacaatgccgactttttacgaaaccggaatgaaaacaataagcggccatcaatccagttatctgccgtggtacggtttttttgaaaaaatgtataagtcggatctgtttgccattcatgacacagctcaatttgagaaaaaaggatttctcaaccgcaacagaatcaaaacgccgcagggccccagatggctgacggtgcctttgcagatgaaacaatataaagacatagagcttcggcatatgaaaatcgaccagacacaggattggcggaaaaaacattggatggcgattaaaatgaactatgcgaaagctccatattttgagcggtaccagcatttttttcaagatgtctatcagagggagtgggaatatctccatgatttgaatatgcacatcattgaatttttccgaaaagagctccgaattgaaacgccgctctgttatgtctctgagcttgaatgccggaaggagaaaaaaagcgattttgttttagcgctttgtcaggagctgggggcggaccgttattattcaggcagtcagggttccgactatttaatagaaagcgattttgaaagaaacggaattgtcattgagtatcagcagatccgacattttggctatcctcaattattcggggagcatatccctcacctctccatgcttgatatgctgatgaactgcggagcggatacagctgaaatgttagttaaaggagggcaatatgatgaaagtaatggtatttgcagcgcatcccgacgatgaaattatcggcgtcggcggcacgctcgccaaacatgtccgccaaggtgacagcgtgtcggcagtcattatggcggaaggcaagtcatcaagaaaaacggattacaaaaagcctgaagattccgttatggagcattctaatcaagaaacggagcaggcgctcagcactttgggcatccatgattttgtcaggctgaaccttcctgataacagaatggattcaatggatttgctggatgtcgtgaaggaagcggagaaacaaatcaatcgttttcagcctgacattgtgtatacccagtacggcggtgacattaatattgaccactccgtcgtattcagagcggtcatgacggcaacccgtccgcttcccggtcatacggtaaaacgggtttttgcctatgaaacattgtcttcgacggaatggaattactgtcagaaggatcagtttcatgccaatttcttcgttaatattgaagacgagcttgaaacgaaattgaaatcgatggcgtgttacggttccgagctcagagacttccctcatccccgctctttgcaggcgatcgaacataatgcccgtgtgtggggagcaaaatcgggttttaccgctgcggaagcgtttatgcttgtgagaggaacatggtgactgtcctatgattgctcaaattccgtttttcggacttgatccgaagcaaatcgatgagaaatgggtggaagcgggatacggtctggaagcgaatatttttgacggccattcctttagtgaagcggattatctcaaaacattcaatcagacgctggaatatgcgaaacagcttgatccttcattattgacgctgcatttcccgacagatcatgccgattatgtgaatgaagatcacatcaaaaaacagctttatcactttgcggagctcgctgtgaaatacggcgccaaaggcataaccgttcatgcgaatcaatttatgacggttgaggaatttcaagtctatgacctggaaggaaaccgtaaaaaaatcgttgagtttttcgcggagtttgatgagcggctgaaagggacggacatctggatcggtgtggaaaaccttccgatcatcgggaatctgggagaggattttgatccgattttcatttatcctgaggattttacagagctggtgcagctggatctgaagcatgtcggtattacgtgggatctgtgccattgggcgattacctatcagactcacttgtcttccgcccttatgttcagaaatgatcagctgaaatatcccgatttctttcagtttctttcgataaaagagagcattaagcattatcacttcagctcatttcgccagcttgcgttcccgcatggcggcgtccgctgttttgagggccgccatccgagtgaagggacgatcgctgaggagctgctgagaagggctgcagatactttgcaggagctttatcggaatcaagataccggcattgtatttgaggtgatggaagaggattatacggaaagacgggaatcatggagaacgctggaatggttcggcggtgtttctgatgacgaggatcaaaaaagggtctgatatgacatatcgaacaccgaactatgcaaagctttggtgtgcacaggtgttttcttcagcggcggacggggtctggctcattgctctgccgctgctagtgctggaattgaccggcagcaaaattcttgtcggcgttatttcttttatcgaactcgtgccgttgacatttggcgtgctggcggggccgctgattgatttattccgaaaaaagtcgatcttgtatttgtgcaatacgggccgggccgtcatcatgatcctcttggcggtgctcagcgcgaacgatttattaaccgtgtggatagctggggtgtgcgccttttgtctatctctgcaatcgatgctgtttgcgccggcgaaagttgcgatcattccgctgctcgtccgcaaacagcatcttgatcaggcgacatctctgatcaatacgagtgacttgatcggactcatcgtcggaaaattgatcagcgggatcatgattgcggctattccgttcgggctgctgtttgccataaacggaactgctttttttatctccgcggcgtttatcgcgttcattcgtatttcagaacagcccagtgaaaaaagcaacggaactgaagatgtaaaagccggttacagaatgctgaaaggaaatgcggcatggctgacatcggtcggatactttttcgtcgtaaatctcgtcattgccggccttatttcagtaatggggccgattcttgctgtggagcgttttcagcagaactattctgtatggtttgccgtcatgtattcaatgtttcaggcggggatgcttttgggcaatctggccgtatttttcaaatggaatacaaaacgcttgaaccggctgtacccgcggacgttaacggcagcgggactgctcattatgctcctgttttttccccttcatgggtttgagtgcatcatcttcctggtgcttggcattatcatctcgtatattgatgtgcaaacggtgctgtatttccaaaagacggttccggccgcatatttcggaagggtctttgcactgattttttccattgtcaaaatgggtgaaccgctgtcggccgctgtctatacagggcttctgctgttgatgaatgcggattatatttttgcggcggtcggactgacccttacgatcgtttttgctattttttcagtcagacaagggagtcaaagaaatacagagaagcaagcggatcaatccgtctgaatggtaaacgaaggggcgccgatgtcagccggcgccctttttatcataaatccaaataaagccgtatcatatcccggcattgaatgccgttttcaaaaatgtcttcatcataatgtctgataaaaaaatcatggtcgacagcctgaatgcggaatccgcatttttgatagagtgacagctgatgaatactggaatttccggtgccgatttcaatcgtgtcagctcccgattgtctcgctttttcaatggcatcttgcaccagctgttttccgaatcccctgttctgcagcgattcttttaccgcgatgtttacgatttcaatcgttttaggccttgtttgcaataaaacgtaaacccctgcaagctcgtctgacgtccaagccgtatagcattctcctcttacaagataatcatcgacaatctccctcgacggatcggccagcagcaatagttcatacagcgcttcatccggctccgcggcttttcggatactcagtttttgcatgtccgtttctcctcctccgttatgatcgacagctatttttcaaaataactccaaaatcattctactttattataaaatatgaaacataggaaaagttatacaagttttgcagattgaataggaggaaagtcatgtttttttgtaagtattgcggccagcagaacaacgaagaggcgcatttctgtaaagaatgcggaaaaccgatcgggaaaggaagccggctggagcggcaggcggctgtaagagcggctgaacctgcttcacaaatgagaaagccgatccctaaaaaaacgctcttcatatggggcggcattgccgcagcgctgatcttattgattgccgcatataaaaccggagcctggctgacatctgaaaaaaggctcacagatcaattcgaacaggcggttcatgacggggacacgaaaaagctcgcagccctgctcactccttcagacaaaaaactgaagctgaatgagaccaatgtcaaaccgctccttgcatacgcaaagaaacacgatgaactgctggcatcgcttcgcggcaattcatcagaaaaagatgcggtatacgtcaaaaaagagggtaaaacccttcttttgtttgaccattacgaattgaaagtcgatccggtttatttccgcgtcaccagcaattataaaggcgccgatctttatatcaacagcgagaaaacaggtacggtcaaaaaagccgatgaaacccaaatcttcggtccgtatacaccgggtgtctacacggcggaagccaagcttaaaaatgagacggttgacgttgtcaaaaagcaagaggcagaggcggccggcagccggaatgttgagtttgacctgccgttagacgccgaggatgtgacattcactccggcagacagcttcaaaagcgcgaaaggcgatctgctgataaacggcaagtccgtccataaagatccgtttacatccgttacatacggtccgctcttaactgacggttccatgacagccgccgtggaggctgattttccttgggggaaaacaaaaactgccgatgttccgatcaacagcactgatatggaattaacgcttattccggatcaagatacacaacaaacaatcatggacacgattgtcaaaacaacgaaacagtatacaaaagcgatggcagacggaaataccgatcagatgaccgaggctggttccgcctggaaagagcagacgaaagaagtggtatccggcatgaagagctccggcacctttttgaaggatcagtataaagagacaagctttgacctggattcatttgcgatttctcaagagaacggccgctggcaagtaactgttacgggtaaagagcttcatgagtctgcttatttcgacgggaatacgaagcctgatatggaagaggctgagccgagctttcattatgtactctcatatgatacaaaacataaaaaatgggttttcgaaaaagctgaccctgcctcagattcttctgggacaaatgtaaaaaaaataaaaaacgaccagccgaaaacctatacatcagcatgggcatcttccaaaggaaacacagcttcaggcagcgtgacaaacgagcaagtcacatcgtttatgactgattacctgacaaatcaatcaagcgccgtcagccttaacaattttgccatcatggcgggcaatttagaagagggaagccctttgtatgcagatcagcagaaactggtcaaaaaactgcacagcgaggggacgaccgaagtatttaatgaagtgaatgtcaaaagcttttcacagaaaggctctcatctgacgattcatacgtacgaggagttttatattacgaaagccggcggcagtccgaagctcagaacatacaattggacgtatggcggcgttgttaaagacggaagaatttatttaacatccattcaataaaaaaaccccccgcgccaatcaggcggcgggggtttccgtttttaaaagaagaaataattcatgagttcttttatataatgcttgatcgtgaattgaaacgttacacaaatgatcaaatagatgacgataacagaataaatgatatccgccttagtagtgagctgatgctgatagctcgccagcatgagcggaggcacggcaaacgccgctcctaaaagaccgacagccagaatggtgaagcaaacggttgtatgaagcagcataaaaatgagggcaagaagcaaaatagctgtaaacggaatcaaaaatgctccgaatctggacagcgaatctttaaatgacacctgcgcggcgccggccttcaaagcgataaaaatcaagagatacaggcagaaaacgcataatgcaaaggtaagcgccggtttgatcacaaccgcggtaaaactgacgtcacgaaagccgtctgataagagaatataaaacataatcggcgtcaccaggcagaaaagcaccatgttgatgatgctgctgacaagctgttcgccgcctgtcgttttacatgtttggtacggtctctttaacacatcaagcacgaataaggcaaattgctttgaagcctgcttagcggcggcgccggcctgagcggcctggccttgcgtttggcctgcgcctccctgcccgggctggggcgccccgcacttttcacaaaactttccgccatcagtttgatggccgcattgagaacaatacattctaaaactccttttacaagtaatatagggattttgttcaatatttacattataaaagaaaatagggcggatgtaacggagttttctaaagatatacaaatcactttctctatgaattgataatagagaaaaagtacccattatggtagaattttaatgaagctgatggatatcatgtctctcggcgcattgattcagagtaaaaaaggaaattaacgcatgctaaaaaaattgaaaatgctttatcggctgttgaaattcggaaaaggcttatggagataacaaacagaaaaaaccgtccttacaaggacggtttttttctgtttccggatcgtccggctgaggttataaaaagcagaccccggggtaaaaaccatgcataagaaacagcggagaacaaaacataactcaataacggcaagtcataaggaggtacgcatgttttcattcatcattcatgtcttcatttcactgtttgcagtctccaatcccatcggaaacgtgccgatttttctttcactgacggaagggtactcggagaaagaacggacagcgatcgcgcgcaaggcttccgtgctgtcgtttatcatcttggcggcttttttaatcttcggccatctgatctttaaactgtttgacattaacattcatgccttacgtatcgcgggcggcatttttattttcggcatcgcttataatcttctgaacgcgaagaaatctcatgtacagtcccttcatcatgaagagaaaggggaaagcaaggagaaagccgatatatctgtgacgcctttgtcgattccgattatcgccggacccggtacgatcgcgacggtgatgagtctgtcggccggccatggcggcatcttccattacatcagcgtgcttatcggcattgcggccgtcatcgcgatgacgttcatcttctttcactattcatctttcatcagcaataagctcgggaaaaccgaaatgaacgtcattacccgactgatggggctgattttggcggtggtggcgatcggcatgatcggcgccggtctgaaaggcatgttcccgatattggtttcctgacttaaaaaagcagcgcccggttatcttcgggggctgcttttttctattttcggcacatgctgaaacacttcttcactctcaaaaaattctatcaaacggctcagccagtcataataatggagccaatccgtcagttcatccaaaagctgacgggctttttcttcaatatcgggattgagattttccgattccagaagctcagtcagctcgcggttcagctttttatagagcattttgtttttgctgaccgcctttgtccaatttgccgtaaacagggagataaacgtctggtaataatcacgctccacgtcataaaggtctttgcgaacgcctttttcaaacactttttcagccagattggcatcggtcatttcgcggaccacctggctcatcctcgttttgctcatcccggttgcctctgacagctcatttaacgtcatcggcttgcggttcatataaataataccgagcacacgtcccagtgtggccggcattccgaatgtatgcatattctcggcgattctctcaatgagatgctcttcagcatgtccgatgatatcaagagcgtttttttccacggctgatcatcccttcactggcttttcatgctgacaatatatcatattttttacagttgatgaaaaagatgatgcggcaggatatgcgagctatcgggagcgattgtaagaacatccgcattgtcagcgggataacatgaaaaaatacgtatattgtatataatttcaacacattgtaaactttttattttacaaatttcatcttataataaagattatacttttcagaaaaataacggaacccttcggaggtgcacggattgctgagattagaaaatgtatcgaaagtctataaaggcggaaaaaaagctgtcaacagcattgatttaaatatcgaaaaaggcgagtttatttgttttatcgggccgagcggctgcggaaaaacgacgacgatgaaaatgattaacagactgattgagccgtcatccggaaagatttttatcgatggcgaaaacattatggagcaggacccggtggagctgagacggaaaatcggctacgtcattcagcagatcggacttttccctcatatgaccattcagcagaacatttccctcgtgccgaaactgctgaaatggccggaacaaaagcggaaggaacgggcgcgggagcttttgaagctcgtcgatatgggcccggaatatttagaccgctatcctcacgagctgagcgggggacagcagcagagaatcggcgtgctgcgcgcccttgcagcggaaccgcctcttattcttatggatgaaccgttcggagcgcttgatccgattacgcgggattcccttcaagaagaattcaaaaaactgcaaagaacattgaataaaacgattgtgtttgtaacccacgatatggatgaagctattaagctggctgaccggatcgtcattttaaaagcgggagagatcgttcaggccggcactcctgatgacattctccggaatccggctaatgagtttgtcgaagaatttatcggcaaagaacggttattgcaatcaagaccggatattgaacgcgtcgagcagatgatgaacaaaaagcctgtcaccgttacggcggacaaaacgctttcgcaggcgatacaggtgatgcgggaacaccgtgtcgattccctgcttgtcgttgatgacctgaatgtgctgcaaggatatgtggatgtcgaaatcattgatcagaaccggaaaaaagcgagcctcgtcggcgacgtgctccgctctgatctgtatacggtcgagcaggggacactgctgcgcgataccgtacgcaaaattttaaagcgcggaatgaaatatgtacccgtcgttgatgaacaaaggcatttagtcggaattgtcacgcgagcgagccttgtcgacatcgtttacgattcaatctggggcgaggaagaccagctggtgacaggctgacaaggggaggaacgcttacaatgaatgaattgatcaagtttttgcagacgaacggcggagaactgttatataaaacgtgggagcatttatacatttcgatcatcgccgtcatattaggcattgtcgtcgccgttccgctcggagtggcgctgacgagaatgaaaaagggcgcaggcgccgtcatcggcgccgtcaacattgtgcagaccttgccgagtctcgcgatactggcgttttttatcccgttgttaggcgtgggaaaggtgcccgcgatcgtcgcgctgtttttctattcggtgctgccgattctccggaacacgtataccggcattcaaggcgtaaacaaaaatctgctggaatcgggaaaaggcatcgggatgacggtctgggagcagatcaggcttgtggaactgccgcttgcggttccggtgatcatggcgggcatccgcacatccaccatttatctgatcggctgggcgacgcttgcttcctttatcgggggcggcgggctcggagactatatttttatcggcctgaatctctatcagcctgaatatattatcggcggcgctgtgccggtcaccattttagctattatcattgattatctgctagcggcgacggaacggaaggtgacgccgaaagggctgaaaggactgaaggaagtatcataaggagttggctgttttgaaaaaaaaccaaaagagatggatgtgcgcactggcgctgtcagctgctctgcttctaggcggctgttcccttcccggcctgagcggggcttccgatgatacgatcaaaatcggggcgcaaagcatgacggaatcagaaattatcgccaatatgatcgcacagatgattgaacacaatacagacttgaatacggcattaattaaaaacctcggatcgaactatgtccagcagcaggcgatgctcggcggtgaaatcgatatcgccgcgacgcgctactcgggaacggatttaacgagcaccctcggcatggaagcggaaaaagacccgaaaaaagcattatccatcgtccagaaggaatttgagaaacgcttccattacaaatggtttgattcttacggatttgagaacacatacgcttttaccgtcacgaaagaacttgcggaaaaagaccatttagacaaagtgtccgatattaagaagcatgcggatcaatttaagctcggtgtagacaatgcgtggctgaaaagaaaaggtgacggctataaaggctttaccgacacgtacggctttgaattcggcacaacctatccgatgcagatcggacttgtatacgatgccgtgaaaaacgggaaaatggatgctgtcctcgcctattcaacggacggacggattaaagcgtacgatctgaaaattttaaaagacgacaagcagtttttcccgccgtatgactgttcgccggtcattcccgacagcgtgctgaagcagcatcctgaactgaagggcattgtgaataaactgatcggcaaaatcgatacggaaacgatgcaggaattgaattacgaggtggacggcaagctgaaagaaccgtccgtcgtcgctaaagaatttttggagaaacatcattattttgaataagaaatgaggtggggcaaatggaagtgctgcagcagctcggcacttattattctcaaaacggcgcctatgtgcttcaggagttttaccgccattttctcatgtcggtatacggcgttttatttgcggcgatcgtcggggttccgctcggcatcttcattgccaggtacagaacattaagcggctgggtattcgcggtgacaaacgtgattcagaccgtgccggcgcttgcgatgcttgcggtgctgatgctcgtcatggggctcggcgccaatacggtgattttgtcgctgtttttatattcgcttcttccgatcatccggaatacgtacacgggaatcgccagcattgaacacgcttatcttgaatcgggaaaagcgatgggcatgaccaaatttcaggtgctccgcatggtggagctgccgcttgcgctttccgtcatcatggcggggctgcggacggcgctcgtcatcgcgatcggcattacggcaatcggtacgtttgtcggcgcgggcggactcggtgacattattgtcaggggctcaaacgccacgaacggaaccgcgattattttggccggcgccattccgacagcgctgatggccgttatcgcagatcttgtgatggcgtggctggagcgggcgctgagtccggtgagaaagaaaaaacgaaccaaagcgccgaatgcggcatgaaaaaaacgccttgcgggtcagggcgtttttttcttatggcttcggaacatgcttgaaaatttcttcgctttcaaaaaactcgatcagacggctgatccagttgtagtaatcaagccaatcctttaattctttcagcagttcgttgattttttcctcagcttcttccggcacgccgttttcaaggacagccgtcagttcgcggttcagctttttatgcatcattttatttttgctgacgaccttgctccatgtggccgtaaacagcgtaataaaggtttggtaataatcctgctcgacgtcgtataaatctttgcggacgcctttttcaaacactttttccgccagattgacgtcaagcatttcacggaccgcctgactcattctcgtcttgctcatgcctgtcgcttctgataattcagttaaggtcatcggcttgcggttcatataaataatgcctaaaatgcgccccaccgtcgcgggcattccgaatgtatgcatattttcagcgattcgttctatcaaatgatcttcagcttgttcgattacgtgtaacggatctttctccaacagtttcaatcctttcagtcagcaattccgatgtcaatataccacatttttaaaccggcggaaatgctcttccgagagaatctggcagtaatccggagcaataagaagaactttgccggtcaatacgggtaaatcagtgcttacacaacctttatatataatatggacaaattgtaaactttttaatttacaaagtttaatttataatgggaaacgttcaattgtctgaaaagttaaatttgaatttaacgaattgaataaacttaatcatggaggtgtgagtgtttgctgacattagaaaatgtctcgaaaatgtataaaggcgggaaaaaagccgtcaacagcatcaacctgaatatcgccaaaggtgaatttatttgttttatcggaccgagcggctgcggaaaaacgacgacgatgaaaatgatcaaccgcttaattgaaccgacagaaggcagaatcctgatagagggccgaaacattatggaacaagacccggtggaactcagaagaagcatcggctatgtcatccagcagatcgggctgtttccgcatatgaccattcagcagaacattaccctcgttccgaagcttttaaagcatcctgccgaaaaacggaaggaacgggcgcgggagcttttaaagctcgttgatatggggcctgaatatttagaccgttaccctcatgaactgagcggaggacagcagcagcgaataggtgtattacgggcacttgccgcagagccgccgctcatcttaatggatgaaccgttcggggcgcttgacccgattacgagagattcccttcaggaagaatttaaaaaactgcaaaaaaccttacataaaaccatcgtatttgttacccatgatatggacgaagccatcaagcttgcggacagaatcgtcattctgaaagcgggagaaatcgtccaggccggaacgcctgatgagattctcagatttccggcgaatgaatttgttgaggagtttatcggcaaggaacggctgatccaatcatccagccctgatattgaacgggtggagcagatcatgaatcccgatcccgtgacggtaacacctgagaaaacactgtcagccgccattcagctgatgcgtgccgagcgggtggattcgctgctcgtcattgatgaaaagaacgttctccaaggttatgtcgatgtggagatgattgaccgcaatcgaagacaagcggtaaccgtcgcggaagtacttgaacgggatctatacacggtcagaagcggcactctgcttcgcgacgccgtccataaaattttaaaaagaggcatgaaatttgtgccggtccttgatgaagccggccgtttaacgggaatcgtgacaagggcaagcctcgttgacatcgtctatgactccatctggggagaagagaatcagctcgcggtgatgtcatgaggaggcttcaattgatatgaatcagaccgtgcaatttttacaggcaaatggaggagagatgctttataaaacatgggagcatctgtacatctcattaatcgccgtcatggcgggcattctcgccgccgttccgctcggcgtcctgctgacgaggatgaaaagaggagccggcgccgtcatcggcatcgtcaacatcattcaaaccttgccgagtcttgccattcttgcgttttttattccgcttttaggcgtaggaaaggtcccggccgttgcggcgctgtttttctattccatgctgccgattctcagaaacacgtatacggggattctcggcgtcaatcggcatcttctggaatcgggaaaaggaatcggcatgacggcatgggagcagatcaggcttgtagagctcccgcttgccgctccggtcatcatggcgggcatcaggacgtcttcgatttatttaatcggctgggcgacgctcgcctcctttatcggcggaggcggactcggggattacatttttatcggcttgaacctttatcagccggagtatattatcgcaggcgctgttccggtcacaatgctggcggccgctgtcgattatatgctggggatgacagaacggaaagtcacgcctgacgggctgaagagcataaaggatgcttcataaggaggaggtctctcatggggaatagatgcaaaaaacggctgctcgcaatcgcctgtatcggcatgctgctccttggcggatgctcactcccgggattgagcgccgcatcggaggataccattaaaatcggcgcgcaaagcatgaccgaatcagaaatcatcgcgagcatgctcgggcagatgatcgaacatcacagcgggttgaaaacatccgttattaaaaatctcggttccaacgccgtacagcagcaatccttgatcaacggtgatattgatatcgccgctacacgctatacaggtgacgcgctgaccgggacgcttcgcatggagccggaaaaagacccggaaaaagcgctgcggctcgttcagcgtgaatttcaaaacagatatgacatgaaatggtttgattcttacggctttgataatatatacgtctttaccgtttccggacagcttgcccgcaagtaccatttagaatcggtatccgatgtcaaaaaagaagcgtctcatctgaaattcggcgtagataactactggatgaagctgagaggcaacggatatcaggattttatgaaaacgtacggaatgtcatttgaaggcacgtatccgatgcagatcggcctcgtttacgacgcgctgaaaagcaggaaaatggatatcgcgctcgcttattccaccgatggaagaatcatcgcttacggactgaaaacgctgaaggatgataagcggttctttcctccgtatgactgttcacccgtcgttccggaccatgtattaaaagagcatcccgaactggagggcgtgatcaatcaaatgatcggcgcgattgatacaaagatgatgcagaaaatgaattacgaagttgacggccgattaaaagagccgtccgtcgtggctaaggaatatttagaaaaacatcattactttgaataacggaaaggagatgtgcggatggacacgatgaaggagctgtttacgtattacgctcaaaacggcagctatgttctgtatgaatgctggcggcactttctcatgtcggcgtacggcgtcgttttcgccgccgttttcgccattccggccggaattgtgacagcaaggcacgggcgtctcgccggttgggtgtttgctgtggcgaacgtgattcaaaccgttccggcgcttgcgatgctcgccgtcctgatgcttgtcatgggactcggcgccaatacggtcatcacggctttgtttttgtattccctgctgccgattctcagaaatacgcacacgggcattatcaatatcgagcacgcttatctcgagtcgggaaaagcgatgggcatgacgaaataccaaatccttcgtatggtggagctgccgcttgcgctttccgtcattatggcgggtcttcgaacggcgctcgtcattgccatcggcatcacggcgatcggcaccttcgtcggggcgggcggcctcggcgatatgatcgtcagagggtcgaacgcgacaaacggaaccgccattattctggcgggcgccatcccgaccgcgctgatggcggtagccgcagacctgctgatggcgtggctggaacgagccctcagcccggtgaaaaaacaaaaaagaaagctgatcgtacgctcagcctcatgaaaaaagcattcttccgcgtgaaggatgcttttttttgatttcttgattaaattttgataactgcgctgtaaagtcttacatatcaaataacaaagcaaaggggtaatcaaatgagcaacatcttagaaacgagacagctgcaaaaatcattcggcagacaacaggcagtggctgatgtgtctctatcagtaaagcgcaacagtatatacggcctgctcggtccgaatggcgcgggaaaatcaacgacacttaaaatattgaccggcatgctgcagcaaacatccggcgaggttctgttcgacggacatacatggaagcgcgaagatttgaaaagcatcggttccctgattgaagcgccgccgctttacagcaacctgacagccgctgaaaatctgaaagtccgctgcgttatgctcggactgcctgcctcaagaattgcggaagtgctggaaatcacgggattaacgggaaccggaaaaaagcgcgccggacaattttccatgggaatgaaacagcgtctcggcattgcgttagcattattaaaccgtccgtcgctcttaattcttgatgagccgacaaacggattggacccgatgggaattcaggatttgcgggaatttatccgctccctgcccggacagggaatgacggttattttatcaagccacctgttatcagaagtcgagcagatcgcagaccatatcggaatcatcagtgacggcgttttaggatatcagggagaaatcagccgggaagacgatctggagcggctgtttctggaggttgtcaaatcaacacgggagaaagcggggactgggaaatgattcagtacatgcaggcggaacaccttacatctaaaagaacatttatcagaaagctgatcattctgattccgcttctaaacacggctttttcttttctgctgaatacggcttattttatgacgggcacgttcaattggtgggcggttattttcatgccgctcatggttgctctaatgtgcggtttatctgttaaaaaagagaaaaagtcagcgaatgaccgtgcggtgtactcactgccggctgacttgaagagcatttggttctcaaaaataagcttgatcgcgctgtattcactcctgtcgcaaatcgtctttttagtcatcgtgtttttgcttggccttgtgtttccggcaattgctgcggttcagctgaaaggtattgaagcaagctcccttttgtggctgtctacgctttgggaaattccgttctgcttatggattgccagacagttcgggtttacggcagtcattctcgtgaatatgatcgccgcttttgttttgggtattgtgccggcgtccggttcattgtggtggctgagcccatggagctggtcagtccgggtgatgtcaccgattctcgggatccatccgaacggaattccgcttcccgcagacagcggcttattaaacggaaacgtgatctttccggctattattctttctatcctttcttttatcgcaataagttttgtttccgccgtgtcttttgcaaaagggggaaaccggtcatgaccgtgcttttaagatatatgtgggccgatgtattaaaaatgaagcgcacgccgctcatatggatgcatgctgcggcgccggttttatgcgcgggatttttccttttgtatatgtatggaagggttcaggagccttatatgctgtacagtgtgtttttcagcgtgattgccgttttataccctttaatcatcagtattgtctgcggcatgtctgcctccgttgaggaacaggcgggccattttcagatgatgctggcggttccgtattctaaaatcgtcagttttgcgggcaagctgcttctattgctgctcttgaatgtgttatcgataggtctcgccatctgtctttatttggcggggatgaaatttgttcttcacatcaatgacctcccgtatcttctctttttaaaaggaggggcgtggctgattgccggcagtcttccgctttatatgatgtctttttttgtcggcataaagtacggcatgggaccgtccgggcttttaggaggtgcgggattattaatggcggcgctcatgaatacgggacttggcgatatcatatggcgttttgttccgtgggcatggagcgtgcggctttcaggccttgcaggactgctgcattttgacaaagtcaaaaaagagttcctcccttatgtaagatacgatatgagatacggagaaataatgttatatttttctatagtgatattatgtctggccggcctctattggtgcagaagatgggaagggcggcgttcatatgaataaaggcaaggagcgattcggccggtggcaaacattttagcaattgatgatgaaaaagatattctcgttctgatcagaaacattttacagcgtgatcagcattcagtaacgattctggaaaaagcggaggatcagtcattggatttttttcaaggctatgatttgattcttctcgatgtcatgatgcccggaacagacgggattgaactctgccggcggattcggccgctggtggacagcccgatcctgtttttaacggcaaagtctgacgaagaatccattgtgaaaggcctcatgacaggcgctgatgattacatcacaaagccgttcggtgtacaggaattgatggcaagggtaaacgcgcatgtcagaagggaacggcgggaaaagcatcagacgaaacggctgatatcaggcttcatgtttgattttgacaataaagaagtatggattgatgaccggaaactgcctcttacgaaaaacgaatataaaatcgttgaatgtctggcacagcataaaaacagaacattctcacgggagcagatttacgaggaagtgtacggcttggacggcgatgcgctctattcaaccattacggagtttatcagaaccatccggaaaaaatgtaaagaacacggggctgatccgatcaaaacggtgtggggtgtcggatacaaatgggaatagcaaaaggaaaatcaagcatccgcaaagagcttgtcaaatttaccatcacgctgtgtctgagcacgatgggggtggcggcattatgtgtcaccttaaatgccattgccatgaatgccggagcgatcctgcccgcaaattacagcgagcatgaggcggaacagatcaaaccccgcctgaaatcagcggaaaagataacagaagacatgatccccgcaggtatgacatacgccgtttttgataaaaaaacaaagcggatgacaaaaggaacgatgacggaacaagatgcggccaacgccagaaaaaaaattcagcatcagccgtattttaattatgcccaaaaaggattcatggtgataaatcggaaagatgaatatggcgttctccaatattcactcaggtcggaatttcagtcgccgctgttaaggcgttatctgccgaattatgaatggacggggcttacgattctgatcactttgcttcttttgaccgtttttatcgtgacgacgcgtttcgccaatcagctgagacggcatttcagcacactcagctccattacggcaagcattcaaaaacagaatttaaatatcaatccaaaaaggtcgcgtataaaagaatttgacgatgtcattgactctctgctgaaaatgaaagacgcgcttcaggcatctctggcggcgcaatgggaggcggagcggatcaagaaagaacaaatcggcgcgcttgcgcatgatattaaaattccggcaacgattattaagggaaatgccgagctgcttcagttaacagagcctgatgaggagcaggcggaatatgcgcagtatattctggatgccggaaacaaaatcgagcattatgtcggacagctgatccagctttctaaagcggaggaatcagttgccgttcatgtcgaatataccgacctcaaagagtggattcaaaatatatatcgtgacgcggcggcgcttgcggggccgaaacagattgatctcgccctcagcgaacggggaattgaccgaaaagaagcgccgatcgatcatgagctgctccacagggcggtcatgaatatcgcggcaaatgccgtcgactatacgccggaaggaggggaaatccgtgtggacgtcctgtgcaccgattccgccctccatcttgctgtatccgacagcggaagcgggttctcacaggaagcgctgaaaagagcgacacagcttttttacacggaggataaaagcagacattcggcggggcatcacggcatggggcttacattcgcccatcatgtcgtacatcttcaccacggagaattaatacttgaaaatcaggagtctggaggagcccgggcggagattcgaattccgctggaaggcgtcagacaaaaacaagccctgcacgcctgagggcttgtttttctgtttaagaaaagcaaaaataaaaacggctgtccgtttgagagatcagccgcttatgcggaaaagagtttattaggaaggatcaatccattgtgaagaccacttggaaatttcctctaaaataggggctaatgcgcagcctttttccgttaatgaatactcaatgcggacaggcgtttcggggataacatcccgtttgatgacaccttctgtttcaagttctttcagacgttctgacaagactcttccgcttaaattcggaagcgccgcttcaatttcgctaaatcgctgctgtccgttcaataactgaaagacgattagagccacccagcgtttacttaggatgtcgaccgctttttcgaatctggggcacatttctgattggttcatgctttttcacctcgtcttctgctattataccgcaaaatcggagggaacgtacgtctggcgcttgttaagttgaggagaggatcaaaaagaggatgaggaatccggggagcgctttttcgcttcagccgcaataaaatcaaagtatttgctgacgctttcaatatcttcttttgtgaagtgctgccactttttgctgtcaaacagcggcagatgctccgcgcctctgtcaacggcggtctgatagatggcgcagatggattgatagctttcggaggtttcgcggatttcctcctgaaatgccttgatgtgtccggcccgcgccattaactcctcgtacggaatttttaatgtgtccgccaattttctgatggtcgcgggtttaggaatgccgcggtgcccgttttcaattctggaaatcgtcgccgagctgacgccggaataaacggcaagctgattgacggtaagcttccgggcgcggcgcagctctcttaattgctttccgaatgtgttcaataagatcgcctcacatgtgcaaagtcatgagtcttcgtttgttctttttttggcttccgccgataagaacgcaaagtatttatcaagcagaaccaagtcttctttcgacaggtgccgccagttctcccgctccaaaagggataaatcatgcagctcatacgtttcggctttttccagcaaggtgcagcctgtgtcgtacggggctctcgtttcctggacggtctctatgtatcccgccgtctgcatcagttcctcatacgggatttttaacgcatctgcgagctttttaatggttgcaggtttcggcaccccgcgtttgccgttttcaatccgcgagattcccgcggcgctgacgcctgaatacgttgccagctggttcactgtcagatgccttttttcccgcaatgtccgcaattgtttcccgaagctttccacagtctctccccctcccgcggtctatttatattctagtatgtttattgactaaagggaatagccaggctggaaaagtattgacaaaagttaacaaaagccgtatcttatgtataagaaagaaagtatttgacagaacggaaggtgaagaaagtggtcgaaaagatacagatcagaagagattatgtgctgcagtatatggtcaataatgactactcgttaaaccagctcgccctggagatcggaatatctcccgccacactgagccgtgtactgaatggagagcggaggccgggccagctggtcatcggaaaaatgctctattactttgacatgaaatttgaagatcttttttactacgactttgttgacaaaagtcaatgatgatggaagattcaaacgcatttccgtttttctgacatgatgtgcaccgatacggcgtgacatgcctttgtttttcatgtaaaatagaagcaatgtaggccagtcagtctggaggtgtatgggatgcacacattattgattaccttattggttatcgtcagtattgcacttattattgtcgtattgcttcaaaccagcaaaagcgccggattatcgggtgcaatttcaggcggggcggagcagcttttcggaaaacagaaagcaaggggccttgatctgattcttcaccgcacaaccgttgtgctggcagtcttgtttttcgtgttgacgatttcgctggcgtatatcgtataaggcaatgtttgtataaggtctgatttaatatcaggcctttttcttgttgagagacggcgtttgtttctcgcaaaactgtggaaaactaaattgaatgtgcaaaaaaggggttatgagcatgaaaattgtgacaccaaaaccatttacatttaaaggcggagacaaagcggtgcttctgctgcacggatttacgggaaatacggcagacgtcagaatgctcggccgctacttgaatgagcgcggctacacttgtcacgcgcctcaatataaagggcacggcgttccgccggaagagctggtacatacggggccggaagattggtggaaagacgtcatggacggttatgaatatttacggtctgaaggctatgaaaacattgcggcctgcggactgtcgcttggcggggttttttcattgaaattgggttacactgtacccataaagggaattgttcctatgtgtgcgccgatgcacattaaaagtgaagaggttatgtacgaaggagttctctcctacgcgcgcaattataaaaaattcgaaggaaaacagccggagcagattgaaaaggaaatgaaggagtttgaaaaaacaccgatgaatacgctcaaatcgcttcaggagctgattgccgatgtgcgcaagaacgtcgacatgatctattccccgacatttgtggttcaggcacggcatgaccatatgatcaatacagaaagtgcgaacatcatttacaacgaggtggaaacggacgacaaacagctgaaatggtatgaagaatcaggccatgtcattacgctcgataaagaacgggacctcgttcatcaggatgtgtacgaatttttagagaaactcgattggtaacaaacaggaggtcgaataatggaaaaagaagcgtttatggaccgtcttctcgcgtttatgaaggaagaggcgtacaagccccttaccgttcaggaactcgaggagatgctgaacatcacggaagcagatgaatttaaagagctggtaaaagcgctggtggcgctcgaggagacgggacagatcgtccgcaccagaagcaaccgctacgggcttccggaaaaaatgaatttagtaaaaggaaaaatttccgcgcatgcaaagggattcgcgtttctattgccggaggatacctctttaagcgatgtgtttattccgccgaatgagctgaatacggccatgaacggcgatatcgtcatggtgcggctcaattcccagtcaagcggatcgagacaggaaggcacggtcatccgcatcctggaaagaagcatcgaccgcgtcgtgggcacatacacagaaacgaaaagcttcggctttgtcatcccggatgataagaaaatcacgagtgatatttttattccgaaacatgccaataacggcgctgcggaaggccataaagtcgtcgtcaaactgacaagctaccctgaaggcagaatgaacgccgaaggagaaatcgttgaaatactcggccataaaaatgatccgggcatcgatattttatccatcatccataagcacggcctgccgggagattttccggctgaagtgatggagcaggcaacaagcacgcccgataccatcgatgaaaaagacatcaaagaccgccgtgatctccgcgatcaggtcattgtcaccattgacggcgccgatgcgaaggatctggatgacgccgtcactgtaacaaaacttgataacggcagctacaagctcggcgttcatattgccgacgtcagccattacgtcacggagaattccccgattgacaaagaagcgctggaaagagggacaagcgtgtacttggttgaccgggtcattccgatgattccgcacagactgtctaacggaatctgttctttaaatccgaaggtcgaccggctgacgctttcctgcgaaatgacaatcaaccagcagggacaggtgacagagcacgagatcttccaaagcgtcatcaaaacgacggaaagaatgacctattcagatgtcaaccggattctcacagaagacgacgccgagctgaaagaaagatacgagccgctcgtcccgatgtttaaagacatggaacgtctggcggaaattctccgggcgaaacggatggaccgcggcgccgtggattttgatttcaaagaagcgaaggtgctcgtcgatgaggaaggcgccgttaaagacgtcgtcatcagagagcgctcagtagcggaaaagctgatcgaagaattcatgcttgtcgcaaacgaaacggtggccgagcacttccattggatgaacgtgccgtttatttaccggattcacgaagagccgaacgccgaaaaactgcaaaagtttctggagttcgtcacgacattcggttatatcgtcaaagggaaagccggagacattcatccgcgcgcgctgcaaagcattcttgacgaagtgcgggaccgtccggaagaaacggtgatttcaaccgtcatgctccgttccatgaagcaggcgaaatacgacccgcaaagcctgggccatttcgggctggcgactgaattttatacgcacttcacatcgccgatccgccgctatcctgacttaatcgttcacaggctgatcagaacgtatttgatcaacggacaatcggacgaagcgactcaagaaaagtgggccgaacgccttccggaaatcgctgatcatacgtcaacgatggaacgtcgcgccgttgatgccgagcgggaaacggacgatctgaaaaaagcggaatatatgcttgataaaatcggcgaggaatttgacggcatgatcagttccgtcacgaatttcggaatgtttgtcgagctgccgaatacgattgaagggcttgtgcacgtcagctttatgacggatgattattaccgttttgacgagcagcatttcgccatgatcggtgaacgcacgggcaacgtttaccgcatcggagacgaaatcacggtcaaagtcgtcgacgtcaataaagatgagagaaacatcgactttgaaattgtcggcatgaaaggcacccgccgtccgagagaaacaacaggcgaccgcagaaaacgaggcagaccggcgcggaaacgcgtgttaaacagcaataccccggcttcaccgccgaaatcggaggaaaaaggggaatggtttacaaaaccgaagaagaaaaagaaaaaacgcggtttccaaaacgcgccgaaacaaaaacgcaaaaagaagaagtaaatgcgaaaagcaaatggggcaaaatgctctgtttgctttctttcgcaagccgcattttcattgtcgcggaacgctccttttgctaaaataaagcgtatcgcacacatgaacggtttttgcggagagaggaggataaggcatgccaaaaggatcaggcaaagtattatcgcaaaacaaaaaagcaaaccatgattactttatagaagaaacctatgaaacaggcatcgtgctgcagggaacggagattaagtccatccgcgccggccgcgtaaacatgaaggattcctttgcgaaaatcgagcgcggcgaagtgttcctccacaacatgcacatcagcccgtacgagcagggaaaccgctataaccacgacccgctccggacgagaaagcttttgatgcaccggaaagaaatcaataagctgatcggcctgacgaaagagaaaggctattccctcgtgccgctgaagctgtatttgaaaaacggctttgccaaagtgttaatcggcctcggaaaagggaagaaaacatacgataaacgcgaagatttaaaacgaaaagacgccaaaagagaaatcgaaagagcgttcagagacagacaaaaaggcttctgatgcatgagccttgatgtgatgactgccctatgctatactgttcacacatcagattcacaggctgtttattgaagacattcccaattgaatttgtctgtgatcatgatataataacagtacagccagttgagcaagagcttgatagatctcccgtatacccttaacaaggggacgttacggattcgacagggatggatcgagcttgagctgcgagccgagaggcgatctcgttaacacgcacctaaatataactggcaaaactaaaagttttaaccaaaacttagcactagctgcctaataaacgcagcgagctcttcctgacattgcctatgtgtccgtgaagagcacatccaagtaggctacgcttgcgttcccgtctgagaacgtaagaagagactgacagactagctctcggaaggcccgcccgcaggcacgaagacgagtgaaacacaaaatatgcaggctacgctcgtagacgcttaagtaatcgatgtttctggacgtgggttcgactcccaccgtctccatacataacgccaaaccacgctgttatcaagggtttcaacgccttcggtaacagcgtggcaacattttggcaacattttaaaaaaattctttgttcataagctcaaccatttccctttgtgcagaggggtaaaggtggctatatgtgtttaatgtttctgccacatttttatgccctagtctctgagcaatgacaagaggattgcatctattatgaatcaaatatgatgcatgagagtgtctaaattcatgaatgaggattcttttgacaccagacagctttaaatatttctcgtatcgtctatctattgtacttgttgcgatactgtcataaaacgaaccaaaaaccttataatcaggtttaaccggcgctaacttttcagcgcttttttttatgctcttcaataagtccatgaccttttgaggtatcataatcctccggatagatgactttgttttgggtttggtaacttctcggttaatcggcttattgtcgttatcggaatacaggaacggtcggaggtgctgggcatgaatcaggcagtcaatgccgaaaggtttgaactggctttagaaaatatgaattatgaatggtcaatggtccagctgaaaaggtcgttcaatactggcatgatgggaaatcaattcttgatatgtcggaattattaaacagggattcggatgaaatcattttgttggtcatggattttgcaagaaaaaacgtcctgcccgcccgcaagaacggcttatgcgccaataacaggataagaatatctgagaaaacgatgaaagatgaaagagaaaatgattcggctacgctatttatttgaagaaagcccggtgtatatcccttttcaggaactaaacttcatgttttatgacagcgaaatcaggcgtttccgggagctatgggcggcaaatgagtcttatctcaacatagcaaaagagcaaaacggaatgaagacgaaacgttattccttatcatcaaccaagcaaaaagagatctcatagagccgcgggaatccggcttgctcggaagggaagcgacagaagatgcacgcaacaagcaaaagcttccgttttgaaaaagaaacggtcccgaaacttatggtcatcgtgcaatatgaagactgtaccccggaggtacggaacgcggcttcgcaaatgttgatgatgaagggagtggcagacgttgggacaggaaaaacgaaagcatttaattgaatggcttttgcttatcggctcttatggcagagattttttagaccgaattatcatatctggcgttgtgtttcgtaaggatttttcaggggctggttataactggctgaggtctgacagcattccactcggcatggatcaggcgttaaacctagttgcggatgaagcttttgaaataaaggaaatcatttgacggaaacaagcttcagtaggatataacgattacaattccggcaaccgggaaagatattcagcagctaaatacggcaatgacaatttctgaagattgattgttactttcattggtgaaaagacagcctttcggagttgtacagcgtgcgttaaaacggttagtttcctgctgaataggagaattatgcgaataacaatatgtctgaccgaccaacaaagaagattaaaaaataaaaaatttgaacattagcctcgaaatttgatgaacgaaaatcaaattttattgattcaaaaatgttttgtgttttacgaattagtatataatgtttttaacgagaaatgagagcggggttaatatgaaaatagaaataaaaaatttgggtcaagttaaacgtgcatcaattgatgaaaaagacttaacagtaattgttggtgacaacggctctggaaagacgttactcttagaggcgaagacctttattgttaattattataaaaagaatgcagaaaaaattattcgtgacattaataggaaattttcaggcgattttgagtttgagacagattggtccaacattagaaaatttatttctgaaagcatcgaaactgtcaaagtaggaagtaaaaaccccccatcttctaattttattttagagaacaagcttaaaaatcatgtgctagaaaatataaataaatttattaaggaacagtttgaggaacttaaacagcaaacaattaatgaattgaacagggaaattcttatggttgatgagtcagagttggattttacatggtttgagactcctccaaccgttttttcagttaatcacattaagtgtacccttactttactggacaaacatttattaatactagagatgtcctctgaggatgctgaagattatgaagtattaaattcagttattatcaatttgatccccaaagaagactatataatgaaaagctctatggatcctgagattatcaaagaaaaagagaaattgtatgacccgataaatcaaataaaaattgcaatgaaaaataattttatttttggtttttttaaagaaataacacatagcggcaatacactttatcttccttctgagagaaatttatttatggatgatgcattaacaaagactttgaaagaaagttacgatagtcgttattcttttaaccggaataactcaaaaataagatttagtgaatttttatttaatatggcgtacttaaaccataaggataggttaaaccgtcttaaaaaaatggattttgaattagagccagaattacaaaaaatattcggtggtcagattgtctttgatgaggaaggagatataaagagtatagttaaaaaagatgggagcaccatcaagagggaacttttttctacaaaacaaaacaggttgattccatatcttataataaatacaccttttatacattacagtaacgtgattattgaggaacccgaagcccatctatctttaaaaagtataagggaattattgggttactttaaatttttaattgatagggggattaagataaccatcacaacacatagtgatgtattcttcaatcacttgaacaatttcatcttaaaggataaatcgcttgagactaaagtttatgaattgaagttctatggtgatgaatcaattcttgaagaaaaaacactaactgagttagggtatgaaattgacctgtttacagaagaattaaataacttgtatgatgaaacactgtctattcaagataacaacgaacaggcagaaaattgagggtagatttatgattccaacaatgtctttaataagagaaaatgatataataacaattgacaatagtattgacatttctgaatttgttaaagataaaaatgcaaaaatggtattgaaaattaacaacgaatcaaattcagtcctttttaaagctttctgttatcaaaaaacgaaaaatccagaatcaagcaggttggattttttccatattgatcaattccctgatggtatattttttaaagataatggagatggcacctatcattgttatatattcgaattaaaatatacaggatccaatgacttgcctaagctaactaaacaactcttctcagggtatgtacattgtaaatcccttttatctgtattagatattgatattaccaaaattacttattcctttcatgttgtttttgtccgagaaaacagtagtcaagacaggtttaataaaaaagtggcagctagaaaaattatacctggaaaaaaactgaattcgaattcagtttttgataactggttaaataattctttagtttatagcacaagtgagtatgaaaaaattatgaaaattgataaggtagttttggacattacaaaagaagaagaaaagtatatagtacattatagtaattttataatttaaaaagtttcaagatgaagatgcctgaggacactaatcgatgtacagagagatctgtactttgggtcggtgtctgtttttttagcgattggagagacttttaaaaagctcagaagaccagctttgaggacaactgatgtgataggacaaggctaagaaggaaaaaaggcggggctttaagaaaaagtaaatgagagggtaaatatatgaatcaattaatattaaatattccttaggttgacgaagaagcaacaaaaagtaccggaagatttcttgccaaaagtgaccgcaacatatagccttgtccctcccagcttttcgaatgaatttcattcctccatagaagatgcagcattaaacgcatggattgggaggttaaaagggaacagtttttaaagagaatgcaaagagcggttaaccggctttcccaaaaggagcggcaaattcttgttatgctctatatgcagaatgaagagatattttatgggattgtctgacaggctggatcgaacttccgctgactttggtgtggaagaattttgagatcagtcagaaggcattgggttcggatgctgatgatgtcttggagctgtttcaagaggctcaggaagagttagggaatcgatttgtcattcaaatcgatcagccgtcagccaggacaacggacaggcactaaaaagtgcgtacttcccctcatccatttttctatccgataatagggacggaaggtttcaggctttcgatttctgtccatatataagaagaaacttgcgatagggaggaatgaatgatggatttgcagttgaaagggaagacggcgcttgtgacgggatctacgtcaggcatcgggaaggcgattgcggcttcgctgattgcagaaggtgcggccgtgatcattaacggccgccgtgaagaaaaggtgaacgaaacgatccgggaactagagaaacagacgccggatgcccgtctctatccggccgcatttgatttaggcacggcggaaggatgcggcgcgatttttcagcagtatccggatgtggatattctcgtcaacaatttaggaatctttgaacctgcggaatactttgatattcctgacgaagagtggctccggtttttcgaggtgaatatcatgagcggcgtgcggctgacacgccggtatgcaaagcggatgattgagcgtaaggaagggcgggtgatctttatcgcgagtgaagcggccgtcatgccttctcaggaaatggcccattacagcgctacgaaaacgacgcagctgtcgctgtcacgcagtctggccgagctcacggaagggacgaatgtgacggtgaatacagtcatgcccggctccacgaaaacagagggcgtcgaaacaatgctcgagtcgctttaccccggtgaaaacctgagtgcggcggaggcggagagacgatttatgaaggagaatcgtccgacgtccatcattcagcggttgatccgtccggaagaaatcgctcactttgttgcctttttaagcagcccgctgtcgtctgccattaacggatctgcattgcggatcgacggcggcttggtgcggagcattatataagatgaacgtacaaaaacccccgtaaagcgggggtttttttaatgcggatcacgctgaaaccggctgatgatcctgctgattaaatcttttgtggcggagtcaaaatgctcttctttttggtttgtcaaaagcccgaccggcggagaaattgttaagttatggatcggaatgaccttcgtgccctcgatcggttctgagtgcgccgtcgccgtaaagattgagacgccgatattttccctgacatagtattggtgagccatgctgctggtcagctccatttttcgatagcggctgccgatggcccgctgcaggtgctgttcaatttgaatccggatcgggcaattggcgggcgtgaaaatcaggcattcattttctaaatcctcgagattaacgcttgctttggcggcaaggggatgtctgtctgacacgatgacattgagcgagtcatggaaaaacggatcgaaataattttccagaatcagctccggctcgccgcatacggcaaaatcaatggcgccctccagcagtttgcggctgcatgtattggcatcatccacgctgatattgaccgacatgtcaggataatcatgtaagaaaccccgcagtacggcagggaagatcagacttgccgtcggttcggatatgccaatctgaataaggccggcctggccctgtctgatgtcagccagagtatggtcaagcacctcgtattgcgcgagaagctgcccggcccgctcatgaaacagccgccccgcccttgtcagcttcagcttctttccccgttcaaacagctgcgcgcctacatcctgttccagctgtttaatccgcattgaaatcgtcggctgtgagtagttcagaatttcggcggccttataaaagctgcctgactgtacgatcgtatgaaacgttttaatggtgcgtaattccaacgaaatcccctcccggctgttcattaattttcttgaatctttcctttactttttttgattagtcaaataaatcagtttgctttatagtataaacaatcaaagcttagtaaacaaattggaattatatattttgtggggagagtgaccggaatgagtgaagacatatttcgattggctgagaaaaaggatgcgccggagtttttagagctgctgtacagcgcgtttcagccgatccgcaatttggagattgactggccgtcggcgcgggccgacatcgatatggtaactgaaaatattgaaaatcattcagccgtcgtgctcgaacgggacggacggcttctttcaaccattacgatccgttttccgtgggagagtgacacgcctccgtcaaaatatccgtttgtctggtggtttgcgacgcttcctgagctgaaggggcagggcatcggcagcatacttttgacttatgtggaggaacacgtgctgcgggatacgctgaaggccccggccatcacgctcggcacttcggcgcgcaagcatccctggcttgtggatatgtacagacggagggggtatgaagtgtattttgagcaggagaaagacggagacatcggagtcatgatgagaaaggtgctcataccggagcggtttgacgcgtcgctgttaggcacaccgagctgggcgcaatgataaaaaaacggatcagagccggctgtctgcttctgctgctcggcgtgctggccggctgcgggcaaggagaaagcacaaaagccgggagcggcgtgcagaccgtcattgtcggcacgggaactgattttccgaacattgcttttatggatgaaaaaggcgagctgaccggctatgacattgaagtgatgaaagccattgataaacagctgccgcaatacaaatttgtctttaagacgatggatttctcgaatctgcttacaagtctggcaaaccggaaaattgacgtgatcgcgcacaatatggcgaaaaataaggaacgggaaaagcgctttttgtatcacaaaatcccgtataactactcgccgatgtacatcacggtgaaggcggataataacgcgatacacacgctccgggatttaaaagggaaaaccgtcatcgtcggcgcgacgtcaaacgcggcggattatatgacggcatacaacaaaacccacggcagcccgatacatttgaaatacgccgggcagggcggcaatgacacagcgaaccaaatggagacaggacgcgctgacgccaccgtatccacgccgtttgccgtcgattttcaaaataagacgcacgggttcaaacaaaagacggtcggtgatgtgctgctggataccgaggtgtattttatgttcaataaaaacagccaaaccctggcggacgatacggatcgtgcgattcaaaagctggagaaggacggcacattgaaaaggctgagtgaaaaatggctcggcgcggattattcaaaatcaagtttcacgaaataactgaagcagaaaacggggcgatcacatgaaaataagactggcggtcatgtcattaacaattgccgcaacggcggcgttatcagcctgcggcgcgggcggagaggcggcagcaggcaatcagaaaaacgtgaagaacatcacggtcggcaccggcactcaatttccgaatatttgctttattgatgataaaggcaaattgacgggctacgacgttgagctggtgaaagagcttgacaggcgcctgccggactatcgtttcacctttaaaacgatggatttctccaacctgcttgtcagcctcagccagcataaagtcgatatcgtagcccatcaaatggaaaaaagcgccgaacgggagaaaaaatttctgttcaatcaagtcgcatataacaacttcccgctgaaaatcacggtgcttcaagaaaacgggaacattcacggcattgaggacttgaaagggaagcgggttattacgagtcccacgtcaaacggcgcgcttgtgctgaagaaatggaatgaaaaacacgacagtccgtttgaaatcgcttatgccggccaaggctccaacgatgcggccaatcagctgaaatccggccgcgccgatgcgacgatttcaacgccgtttgccgtcgatttccaaaacaaaacgagcgcgatcaaagaaaaaacagtcggcggggtgctgtcaaatgccaaagtgttctttatgtttaacaaaaatgaacaaacgctgagcgatgacattgataaagccctgcaggaaatcattgatgacggcacgcttaaaaagctgagtgaaaagtggctcggcgcggattattcaaaggagcaatattaagtgaaaaagagagggatcggcaatggaaaaagcgtttgatatcagtatgatctcatcctttgtgccgacattgctcgggtatttgcccgtcacgctgtatatattggcggtgtctttgctgttcggctttctattggggctgcttttggcgctgccccgcatctatcgcattcccgttttgaatcagtttgcgaagctgtatatctcttttttcagaggaacgcccatcatggtgcagctgttcattgtattttacggtattccggcgctcacggcgctcgccggaattgatacctccaaaatggaccctttgtatgcggcaatcgccacgtacgcgctgagcagcgcggcaagagcggcggaaatcatcaggggaggtgtgaacagcgtcgaccgcgggcaggcggaggcggcgttcagcatcgggctgaacggggggcagacattccggcgcatcattctgccgcaggcgcttgtgcaggcctttcccaacatcgggaatatggtgatcggtttcttaaaagatacatcactcgctttttcgatcggggtgatggatatgtcgggcagaggacagaccttgattacatcgagcaatcattctttagaagtgtatatctcgctttctgttctgtattatgcggccgccctttcatttgaatgtgtcttcagatgggccgaaaaacgaatcaagaaagatgagacgcgccttgtgacggtttttgacatgagcgcgcacggctgaaaaggagggagaacagtggagctggacattccatttatcggcactgcgataaaacaaatgatgaaaaccgttccgcttacattggcgatgacggtcattccgcttattgccggatttttcatagctctcggcaatatcacggtgcgtatattccgcatcaaatggctgctggcctgctcagcgttttacgtgtcttttttccgcagcaccccggcgattctccatatcatgctgatttatttaggggttccgctgattgccgatcaattcagccgcgcgtttcatctcggctggtcggccaatcagattccggtagccgtgtttgtcatcatggcactgtcattaacggcaggcgcttatatgacggaaattctccgatccgggatcatggccgtcgatacggggcaggcggaggcggcatattcaatcggcctgacgcggggacagatgattcggcgcgtggttctgccgcaggcgttcatgatatctctcccgaacttcaccaatataggcatcggctttttgcataccacttccatcgcggcaattgttgcggtgcctgaaattacaggaacggcgacgattgcggcatccgataactatgcgtttctggaagcatttatcggggcggccgtgatttattggggattaacgctgattctcgaagctgtaaacagtctggcggaaaaaagggcagtcagatatcaaggaggcgcattatgatcgaaatccgaaacattcaaaaacattttggcagtcatcacgtgttaaaggggatcaatttaagtgtccggaaaggagaagtcgtgaccatcatcggcccgagcggttccgggaaaaccacttttctgcgctgccttaatttacttgagcggccggatgagggcgccatttcgctgcacagtgaagtcattaactgcaaaaagcctgccaaaaaagacattctcagactgaggaaacagacggcgatggtttttcagcaatatcatttgttttcgcataaaacggcgattcaaaatgtcatggaaggcctgacggtcgcaaggaaaatgaaaaaaccagatgcgtacgccattgccgagcgggaactggccaaggtggggcttcaggataaattgcacgcctatccgaatcaactgtcgggaggccaaaagcagcgggtcgggattgcccgggcgcttgctattcatcctgatgtcatgctgtttgacgaaccgaccgcagccctcgatccggagcttgtcggcgaggtgctcgaggtgatgcttaacattgtgcggaccggcgccaccatgatcattgtcacacatgaaatggaattcgccagaagagtgtccgaccgaattgtgtttatggatgaaggagcaatcgtggaacaaggaacgcctgaggaagtcttttacaagacgaaaaaagaaagaacgaagaagttcctccgccgcgtgctgcctgattacggttatgacataaaagagcgcataaaggagcctgtcgtatgattcgtttaagcattttagaccaaagtgtcaccgcggaaaaccaaaccgcagaagaagccttgcggcaaacggtgaaattggctcaggaggccgaacaatacggatatgaccgtttctgggcggcggaacatcataacaatgaagagatagcgggatcagcgccggaaattgttctggggtatcttgccgcaagcacgaaaaaaatccgtctcgcgtccggcggggtgatgctgcagcattacagtccctataaagtggcggagcagtttcgggttctgtccgcccttgctcccggccgtgtggcgctcggtgtcggcaaagcgcccggcggatttcagctgtcaaccgatgcgctgcagcgggagcttatccagcccgcccgtttgtttgaagaaaagcttgaggagctgactcatttcattcgaaatgattttccggactcgcaccgctatgcgtcattgcggccgacgccgcatactgagtatgcgcctgacatctttttgctcggcggcagcgcggaaagcgcgatatccgcggccaaactcggcatttccttcgttttcgcctatttcataaacggtgaagaggctgcgttagaaaaagcgcgccacgcctttgacgagcatctgccgaaaggatcgaaggcggaatttcaccttgcgccgatggtctttaccgcgcatacaaaagcagaagctgaaaaacacgtggtatcgcgtgagtcggtcaaaatcattctcaaagacggcaaaaaggtgaatgtcggttcccgggaacaagcggaagcgtttcttgaacaagtcacgcagccgtataagctgatcacacaaaagacgggtgtgattgccgggacaaaagaagagacagccgccgagctgagacgattatcggttcaatacagcattaccgattttgtgattttgtcgcctatcaaaaacgctgaggaaaaacgattgtcttaccggctgttaagcgaagcggtgcagccggccccacaattataggagggatgaacatgagtcatgaagtaaacgtagtggtctggagcaaacagggctgctcctattgcgatgaagtgaaaggatatttgcgggaaaacgccgtggcatacgaaacaattgatgtgacagaacgggatgaattgcgtgacgtgctgcagacgaagtacggcatccgtcatgtccccgtcgttgaaatcggcagcggtgacagccgtgcgtatcaggccgttactcaagtcggcattgaacatgtagaacgggcgcttgccgattacgaggggaaaaagggggagagaaaatgagccggacggatctaattcaattcggagccatgattcacggtgtcggcggcacaacagacggctggcgccatcccgacgccgatccgacagcaagcacgaatgcggcgttttacaggcaaaaagcgcagactgctgaaagagggctgttcagctttgcttttattgcggacggcttgttcatttctgaaaagtccatcccgcatttcttaaatcggtttgagccgatcaccattttatcggcgcttgccgcctctacaacccatcttggtttaatcggcacattttccacatcgttcactgagccgttcaccatcgcaagacagctgatgtctcttgaccatatcagcggcggccgggcgggctggaatctcgtcacctctccgcaggcgggagccgcgcgcaatcacagcaaagaaagccttcccgaccacagccggcgctacgccatcgcccaggaacatgtggacgtggtgcgcggtctgtggaattcctgggaagaagatgccttcgtccgcaacaaagaaaccgggcagttttttgaccctgacaaactgcatcgcctgtatcacaaaggcgagtattttcaagtggagggcccgctgaatatcggccggtccaaacagggagagccggtcgttttccaggcggggtcttcagaaaccggccggtcgtttgccgcgaggaatgcagatgcagtctttacgcactccaattcacttgaggaaacgaaggctttttatgatgatgtgaagaagcgggcggcggattacggccgggacgcttccaagctgcggatttttccgggaatcagtccgattatagccggctcacaagaagaagcagaagcgaaataccaagaattcgccgagctgattcccatagagaacgctgttaagtatgtggccagattttttgacgattatgatctgagccggtttccattggatgagccgtttcctgatttgggcgacgtcgggaaaaacgcgtttcaaagcacgacagaccgtatcaaaagagaggcgaaagcccggaatcttacgctgcgtcaagtggcgcgcgaagccgcgtttccgcgaaccaactttatcgggacaccggaacgtgtggcgtcattaattgaaacatggtttcagcgggaagcggcggacgggtttatcattcattctgacatcccgggcatgcttgaagcctttgtggatcaagtcataccgatcctccaggaaaaggggctgtaccgaaaaagctatccggccgatacactgcgggggaatctcggattggatattccggcctgcagacccaatccgattttgagcagaaactgaggtttctgctttttctgctgcttgccattcccgtcattacagccttttttaaaaaaatatactgatttcaagatattattgttgctaaatgatttttttgtaactataattattacagaactgatcagtataaaaaaacattcatatttcataataaatgtgtgtgtaatctgaaaacgaaagggctgtttacaatggcaaaagtactttatatcactgctcatcctcatgatgaaaagacatcttacagcatggcaacaggaaaagcgtttatcgattcttataaagaatcaaacccgaatgatgaggttgtacatatcgacctttacaaagagaacattcctcatatcgacgcggatgtattcagcggctggggaaaacttcaatccggcacaggttttgaagagctttctgaaaacgaaaaagcgaaagtcggccgtctgaacgagctgagcgatcaattcgcgtcagctgacaaatacgtattcgtcacaccgctttggaacttctcattcccgcctgttatgaaagcgtaccttgattctgtggctgtagccggaaaatcattcaaatatacagagcaaggcccgatcggtctgttgactgacaaaaaagcgctccacattcaggcgcgcggaggctattactctgaagggccggcggctgacatggaaatgggccaccgttacatcggcatcatgatgaacttcttcggcgttccttcttttgacggtttaatcgttgaaggccataatgctgaaccgaataaagcacagcaaattaaagaagatgcgattgcccgcgcgaaagaagccggaaaatcattctgatcttaaaaaaacctccccgccgtacggctgggaggtttttcatattaaagggcaatcgtccgtttttgctcgctgcttttcatcgccgcttcaatgacacggatgacatcgatgccttcttttgccgtaacgggaagcggttttccgtttaagatgctgtctgccagcagtttgtagtacgtaaggtaagagccgttctcagaggggattgtttctgtatgccttttttcatccgctgcgattgtcagctctccgaagttgtcagggtcatcggcgccccagctgtcgtcgatcggcttttgtccggctgaaagcgcctcttcctgtccgtcctttccgtatttgataaagcttgcattccgtccgtgaatctgatagcgcgggccgcttgccgcattcatggagcctgattgaagaatgacctgaagcttgccgtaatggagagcggccagaaaataatcgacggtttcactgttgtcccgctgtttcatcacatgtgccgtgacggattccggcattccgaaaagcaggagtgtctggtcaataatatgtgaaccgagatcatacagcgttcccgtggcgggtccgtttttttcgcgccatctttcttgtacaaccgggttgtacagatcgtagttgacttgatatgtatgaatgtcttgaagcgccccgtcccgaatcagcttttgtattgttaaaaagtcattgtcccaccgccggttgtggtacacgctcagtaagacgcctttatcttcagccgttcttctcagttcctccgcttctgctgaagtcgccgtcatcggtttttccacgacggtgtgttttcccgccaggaggcatttcatcgctgattcataatgcattccgctcggtgtcgtgacgatgacgagatcaatgtcaggatcaccggtaatgtcttcaatcgcgcgcacggcttcagcccccggcagatcacgtttgacctcctccgttctggaggtcatgacttttttgatctgataatgatcaaggacgtccaaaagcggcgcatgaaaaactttacccgacaaaccatatcccaatatgccaacctgtatcgttttcaatgaacttccccctcatgatatgtgataacattatataccccgcgggagtactggtaaaacttgtgtgttgaaaattttttacaccggattttcaagtctgtataatgaagataacgaagaaaaaaccgaggtggaaaatggacaaacataccgaacatcaatcgttaaatcataaaagcgccaaagaaaaagaccagatcctgaaccggctgaaacggattgaaggccaagtcaggggcattcagaatatggtggataacgaacgatactgcgtggatattctcgtgcagatttcagccgtacaggcggccatgcagaaagtcgcgtttcatctgctggaagatcacgcccatcactgcgtagccggcgccattgagagcggaaacggggagcaggcgattgccgagctgcttgatgttgtgaaaaaaatcgcaaaatcgtaaaataaaatgttttgaaataccctacaggggtatggtaacatgaagaagaaaaaacaagacgtggagggaatcatcatggaacaaaaaacactgcaagtcgaaggcatgtcctgtcagcactgtgtcaaagcagtagagaccggagtaggagaactgaacggagtgacggcggttcaggtgaaattggaagccggacaggtggatgtggcgtttgatgagaacaaagtctccgtatcagatataaaagacgcgattgaagatcaaggttatgacgtcgtataggatttatcgcgctgcggaaacgggcgcggttttcttttatcataattatacccccctggggtttatgaagagagatgaggatattgagtgaaccgaaagaaatgaccattcaagtggggggcatgacatgcgccgcctgcgcttcaagaatcgaaaaagggctgaaacggatggacggggttaatgacgcttccgtcaatcttgcgcttgagacctcaaatattacttatcaccctgacaaaatcgaagcaagcgccataaaagaaaaaattgaaaaactcggctatcacgtcgtgacggaaaaagccgagtttcagattgaaggcatgacatgcgccgcttgcgccaaccggattgaaaagcgcctgaacaaaatagggggagttgacagcgcaccggtgaatttcgccctggaaacggtcaccgttgaatacaatccgaaagaggtgacaccgaaagagctgaaagagaccgtggcaaaactcggctacagattagacgagaagaaagcggttgatggagccggcggattttcccaaaaggagaaagagcagcgaaagcagctgatcaggctgatattttctgccgttctctcctttccgcttctatggtcgatggtcagccatttttcttttacttcttttatctggatgccggatatcctgatgaatccgtggctgcaattcgcgcttgccaccccggtgcagctcgtcatcggctggcctttttatatgggagcgtacaaggcgctgagaaacaaaagcgccaatatggatgttctcgttgcgctcggaacgacggccgcttacgcatacagcctgtacatgacgattgcgtctctcggacgagacggacatgttgaggggctttattatgaaacgagcgccattttgctgactttgattttgcttggaaagcttttagagatgaaagcgaaaggccgctcatcagaagcgattaaaaagttaatgaagcttcaggcgaagacggcggcggttgagcgggaagggaaggtacaggtgattccgattgacgaggtccggacgggggacatcgtatatgtgaaaccgggagaacgcgtccctgtcgatggcgaagtgattgagggccattccgcgattgatgaatcgatgattacgggagagagcatgcctgtcgataagtctcccggaagcactgtcaccggggcgacgatcaatgcaaacggctttctcaaaatcagagcggtgaatgtcgggaaagataccgcgcttgcacacattattaaaatcgtagaagaagcccaagggtcaaaagcccccattcagcggctcgcggatcacatttcaggcattttcgtcccgattgtgctggggctggccgtgctgacttttctcatttggtatgtatgggccgcgccgggacagttttctgaagcgatcggcaaattcatcgccgtgcttgtcattgcctgtccgtgcgcactcgggctcgccactccgacgagcattatggcgggctccggccgcgcagctgaattcggcattctttttaaaggcggagagcatttagaaaagacccagcgtctgacgacaatcgtactggataaaacaggaacggtgacaaacggcagaccggttctgacagatgccgtaccggcagagggaatgaacgaagaggaactcctgcgtctggcggcggccgccgaaacgggatcagagcacccgcttggagaagccatcgtgtcaggagccgaaaaacgggggattgccatcccgaaaatcacccggttccaagcccggatcggttccggaatatacgccgaggctgacggcagaacgattcttgccggatcaagacggctgatggaatcagaacacattgaacatgaagcgctgcttccgcacatggcccgcttggaggcggaagggaaaacggtgatgcttattgcgacagacggtaaagcggcggggcttatcgcagtcgccgatacgatcaaggaaacatctccggccgcggtgaaacgtctgaatgatatggggcttgacgtcatcatgatgaccggtgacaacaaaaagaccgcggaagccattgcaaaagccgcgggcatcggcagcgtgatcgccgaagtgcttcccgaacaaaaggcggcggaaatttcccggctgcaaaaagaaggccggcgcgtggcgatggtcggtgacggcatcaatgatgctccggcgctggctgtggccgatatcggaatggccatcggcaccggcacagatatcgcaatggaagcggcggatattacgctgatccgcggtgacctgaacggcattgccgacgccatcggcatgagcaggctgaccatgagaaacatcaagcagaatttaggctgggcattgggatacaacagcatcggcattccgattgcggcgtccggctttctggccccgtgggtggcaggcgctgccatggcgttcagctcagtatcggtcgtgcttaatgctttgcgtttacagaaggtgaaaaaagacaaaatgggctgaggcctgttttgtcttttttattgacactttattcaaagcctgcatataatagagaaaacacatatatgagtatatgttcatatatataaaatcgtttagctgtattgatgttatgggaatcctattacggaaagtagggtgagtcgaaaatgaaagcagccaaaggtgaatttgtattagacggacttgattgcagcaactgtgcaaaaaaaatagaaaacggcgtaaaagccattgacggcatagacggctgtgctgtcaattttgcggcaagcaccatcacggtctcagccggcggcaaaaacgagcaatggatgaaagacgaagtcgctaaaaaagtaaagtccattgatcctcatgtgaccgtccgtgcgaaacatgaagacaaacccggcgaggatgagtaccgcaaaaagctgcagctgatgttagtgagattggcagcgggagccgttttggccgtcatcgcttacttcgcgcacacgggcgccgtccttgagtttctgctcttttttgcttcatatttgatcatcggcggcgatatcgtagccagagcgggaaaaaacattgtccgcggccaggtatttgatgagcattttctgatggcgcttgccacgatcggcgcatttgtgattcatcagtatccggaaggtgtcgcggtcatgctgttctaccaaatcggtgaactgtttcagggagcggccgtcagccgatccagaaaatcgatcagcgcgttattggacatccgtcctgagtacgccaatgtgaaaacggaaaacggcatggctgccgttccgccgcaggacgtcaaagtcggacaggtcatcgtcgtgaatcccggagaacggattccgctggacggaaaggtgctgagcggttcttcgatggttgatacatccgctttaacgggcgaatccgtgccgagaaaagcggagccggggcaagatgtgatggccggatttatgaatcagaacggcgtgcttcatattgaaacctctaaaggatatgaagactctgccgtgtcaaaaatattggatctggtcgaaaatgcggccggacgtaaagcgaaaacggaaaactttattacgaagtttgccaagtactatacaccggccgttgtcattgttgcggtgcttctcgcctttttaccgccgcttctcgtgccttcagccgcgctatccgactgggtgtaccgcgcgctgattttccttgtgatttcttgtccgtgcgcactcgtcgtctccattccgctcggttttttcggcggtatcggagctgcgtctaaagcaggggtgctcgtgaaaggcagcaactatttagaagcgctcaatcaggtggcatacgccgtgtttgataaaacgggaaccttaacgaaaggcaatttcgccgttactgatatcaagccggcggcagggtttacaaaagacagcctgcttcatgcggccgcgctcgcagaagtccattccaatcatccgattgcttcttccatccgtgaagcttacaatcgaccgctcgcggcagacgagattgaagaatatgaagaaatacccggacacggcattcgagtgaaaaccggcggatcaacgattttggccggaaatcaaaaactgatggcaaaagaacaaatcgcttccggcacagctgaaaataacggaacagtcgtctatgtcgccgttgatcagcagtatgcgggggcgatcgtgatcgccgacgaaatcaaagaggacgccaaacaggccattgccaatttaaaagcgctcggcgtgaagcggacagtgatgctgacgggtgattcaaagcagaccggagaagctgtcggccgagagctcggtattgatgacgtgtacacagagcttttgccgggtgacaaggtagaccgcgtcgaagaacttgaagcggcgctttcaccgaatgaaaaactgatgtttgtcggtgacgggattaatgatacgcctgtgcttgccagagctgacatcggagctgccatgggggctctcggctctgatgccgccgtcgaagcggccgatgtcgtcctgatgacagaccagccgtcaaaagcagccgaagccatccggattgcacgccgcacacgccggatcgtctggcagaacatcggatttgctttaggcgtaaaaatcatttttctcctgcttggcgcattcggattcgccaccatgtgggaagcggtcttttcagatgtaggcgtcacgctgatcgccgttgccaacgcgctgcgcgtcatgagagtgaaagcggaataattgtcaaagataattcgtttttcagggttttcttaaacaaggttgtcttggtaaaatagagaagcggtccatccggcatccgcttcttttttattttaaaaacaatgaggtgtctgagtgaaaaagaaacaatcgtctgcgaaatttgcggtgatactgacgttaatcgttgtcgttttatttgcggccatcgtaattattaacaaccaaacggaaaaagcgggcgaaacagtcgccgaacagccttccattaaaggacagcccgtgctcggcaaagacagcgcgcctgttacggtagttgaattcggagattacaaatgtccgtcatgcaaagtatttaacagcgatatctttccgaaaatcaaaaaagattttattgataaaggcgacgtgaaattttcatttgtgaacgtcatgtaccacggaagcggctcgcgtctggcggctcttgcttcagaagaagtgtggaaagaagacccggcatcattctgggcattccatgaaaagctgtttgaacagcagccgtcaagcgaacaggaatgggtcacgcctgcattgcttgaaaaaacggtcaaaagcaccgcgaaaaaggttgatcctgacaagctgaaggaaaaccttgataaagagacatttgcaaaagagctgaaagctgacactgacctgaatgataaattaaacattacggcgacaccgacgatttacgtaaataacaaagtgattaaagaattctctaactatgatgagatttcaaaaacgattaagaaagagctgaaaaatgaaaaatagaatcgtatttttatatgcttcttgggtgatagctcttgctgccatgctcggcagcctatatttcagcgagatcagaaaattcataccgtgcgagctgtgctggtatcaaagaattctcatgtacccgcttgtcctgattttaggaatcgccacctttcagggtgacacgcgcgtgaaaaaatatgtgctgccgatggccgtcatcggcgcgtttatatcgatcatgcattaccttgagcagaaggtgcccggtttcagcggcatcaagccgtgtgtctacggcgtgccttgctcatctgaatatattaactggttcggtttcattaccattcctttcttggcattgacggcatttattctcattatgatctgcatgtgttttgtcaaaacggaacgcacggcaaaataaagagcctgctccatgggagcggctctttttctattatttgtaccaagctttgtttgtcgcaatctgtctgttatgggagctgtcccaaatatccacggaataggcataatcataattcatgacgcagcggataccgctgccttgggcgtcatgctgaagcccgaagttatgggaaaactcgtgctgtgccgctttcgccgtgttggccgttccttgatcaaggttcacgctgaaagccgggccgctcggtttgccgttatatacatacgcgataccgccggcgtcaaaacttgattttgcggtaaaaccgacgacaaaatgataattttgatttctgaagctgccttggagattcgataaaatctgagaactgtttgagccggaagaattccaagcctgcacggcctgtacgacgaaatcaatgttgtgatcacggttaaaagcgacatccgcctgctccacgatctggacgattcgcgtttgccagtcgctgtatttggcgcggtattcagcgtccgccaccgccaaaactctgaccttctgagagcccgtgccggctttagttgaggctttatcctgactgacattggcattgaatcgtttcgtgccgacctgcttgccgttttcatccagattttttgtgtcaaccgtctgttcaacttggaccgggcccttcaaatctttaaaatgatcggctttcggaagcgggtccgtatacaccgttttcgccggctccgcatgagtgtgcgaatgcgtatggctttcggctgacggcaggccgggaattaatccggcggccaataaaacaggaaaaacaagtgaactgattttcatctcataaccccctttttgttagagaaagtattcaatgaaacttccaataaacctcccgaaatagtataaaataggtaaatgttcttgctcccagccgttgcgggtggggttgtcccgggttaggaatcagaatctttcaaaaataaggttgattttaagagaaagcgattataaaatctaatggtcgtcagaaaatttaacaaataaaaaggagcatatggaatggcctgggagctgcttagtgtaatcggcatcattgcgtttgcggtcagcggagcgattgttgcgatggaagaggagtatgatattttaggcgtgtatattttggggattgtaacggcgttcggcggcggagccatccgaaacctgctgatcggtgttccggtctccgccttgtgggagcaaggcgcgttttttcaaatcgctctcgcatcagttacgattgtctttttgtttccgaagctgctgttaaggcattggagtaaatggggcaacctatccgatgccatcgggctttcggcgtttgctatccaaggcgctttatatgccgtgaaaatgggccatccgctcagtgcggtgattgcggcagcggtcctgaccggcagcgggggcggcatcatacgggatcttcttgccggacgaaagccgcttgtgctgaaagcggaaatttacgcggtctgggccgcgctcggagggttaatcgtgggcttgggctggttgggaaattcgtttggcttgtacgttctgtttttcgtgcttgttgtttgccgcgtttgttcctatatgtttaagtggcagctgccaaaccgttcttttcgtttagataactaacatcaaaaaaaccgatttcaaagcgaaatcggtttttttgcatataaataacccatatcttgattgatattgggtgaatgtgctaagatgaattgtatttgcctattttattatatattaaatatatgtatccaattatattttacagtatttcgtatgtgtttgtcaactattttctggaggtgccgttcatgaatcagcaggataaggaatggaaggaagagcagtcaagaatagatgaagtgctgaaggagctccgcaaaaaagagcggtctctggaaacatcatcgggcggattaaagcaggatattgtgggcttgagaaaaacgttttgggatgatgtcaccgtgaatatggatgatgcccacgaagcggctgagacattttcaagcattaaacagcaggcggaaatgctttcagaacgtgaacggacgcatcggcttcaataccggcagcttcaaaaaatccaaaagctgaaaacctctccttacttcggccgtgtcgattttaaagaaaaaggggagtcctctggcgagcggatttatatcgggctgacttctttaatggatgaaaacaatgagcattttctcatttatgattggcgcgcgcccatctcgtctctttactatcaatattccccgggaaaagcccgctatgaagttcccgaagaaacgatagaaggagacatcacactgaagcggcagtttatcattaaaaacgggacgcttaaagcgatgtttaacacggatatgacgattggtgacgaaatgctgcaagaggtgctgagcggccattccggacagcatatgaaaaacatcgtgtcaaccatccaaaaagaacagaacgaaatcatccgggatgaaaaaagcaaatatctcattgttcagggagccgccggaagcgggaaaacatccgcggcgcttcagcgggccgcttacttgctgtaccgcgggcgcggggtgcttgatgcccgtcagattgtattgttttctccgaacattttgttcaacagttatgtgtccgccgtattgccggaattgggagaagagaatatggagcaggccacctttcaggaatatatcatccgccgtctcggacgaaagtttgattgtgaaagcccgtacgagcagcttgaatattgcctgactgaacaaaatcagaacgcactttccgtaaggctcgcagccattgcttacaaagcgtcatcagcttttcaggccatgattgattgttatgccgggtcgctttcagtctccggtctgatatgtaaacagatcagtttccggggagacatcctgatttcaaatgagcggattgaagcctatttttattcgcttgatcagcagctgccgattccgaacagagcggagctgacggcggaatggcttctcgcggaaatcagcgcactcgaaaaaaaggagcgtaagaaggaatgggtgctgcaggagagtgagctgcttgataaggaagattatgctgaggtttatcaaaaacttaagaagcaagcggcggatgacgaacctgcatttgacgaccacctgcgcgaacagcgcctgcttggcgccattattgtcggcaaagcctttaaaccgattaagcaggccgtcagacggctcggctttctcgatataaaacggatgtatctccggctgttttcagactggggagctgctgaaaagcccgatcattgggagggcatcggcgctttgaccagaaacgcatttgcagaacggtcacttccgtatgaagatgccgctccgtatctgtatttgcaggatctgttagaaggaaaaagaaaaaacacacaaatgaagcacgtcttcattgatgaagcgcaggattattccccatttcagctcacgtatattcaaagcatcttcccagcggcaaagatgacggtgctcggtgatgtcagccagtcgatttatgcccacaccattacgggcccttcttccctcgccggctgctttcgcaatggtgcagaaaagtatgtcagcctgaaacggacttacagatcgacgcggcagattgttgaatttacgaaagcgctgctggctgacggcgatgacattgagccttttaaccggaacggggaaaaaccgcgtgttttgcggacggatacagaaaaagcgcggcaggaacaattggcggatacaatccgggagctcagacaaaaaggctgggagacggtcgccgtcatctgcaaaacggccgaggaagccaaaaaagtgtttcaggcagtcagcgccgggagcggtgtgcgtttgatcaataaagaaaaccagccttttcaaaaaggggtatgcgtcattcccgtttatttggcaaaaggcattgagtttgacgccgtcattgccgctgacgcctctgctgcccagtacaaaagcgaacatgaccgtaagctgttatatacggcctgtacgcgggcgatgcatcatctgaccgtattgtctccgggagaaccctctccttttataaaagaagtgcccgccggcttattcgtgtaagccctttgccaagtgcaaagggctttttatcattagtaatcttaatcattgtcatcatgattatatattttacttacatacaaactttcggtaaagtttcaattagaatattattttgacaattcctatagaaataacgtacgttacgtttaattccttgtgaggtggatatcgttgcaacttcaggtcatgaacagtccgtttaatcaggagcaggcagagctccttaaccgccttctgccgaccttgacagaatcacagaaaatctggctgagcggttatttggctgcggcccggtccgaatccggtgaaacagccgcacccgctgctccgactccagcagaaagcccggcagtctcaagagaagtcaccgtattatacggatcgcaaacgggaaatgcggaaggtcttgcgaaacagacggtaaagacgcttgaggaacggggattccaggtcaccgtcgcgtcgatgaacgattttaagccgaataatctgaaaaaagtaaacaatttactgatcgtggtgagcacgcacggagaaggcgatccgccggataacgcgctggcctttcatgaatttcttcacggcagacgcgcgccgaagcttgaagcactccgttactccgttttggcgctcggggacagctcgtatgaatttttctgccagaccggcaaagagtttgacgagcgtcttcaagagctcggcggcacccagcttgcgccgcgggttgattgcgatcttgattatgatgagccgttttcggaatggcttgacgcggtcatcggcggtttgaacgaaggagcgggaaatcaaacagccgaagcgcctgccgagacgcccgctctcggtgaatccgtttattccagaacgaacccgtttcgggcggaggttcttgagaacatcaatctgaacggacgcggttcgaataaagaaacacgccatctcgagctttcgcttgaagggtcgggcctcgcgtatcagcccggagacagcctcggcatctatccggaaaatgatccggcgctcgttgatgagctgatcaatgagctgaaatgggacccaaaacaggaagtggcggtgaataaacaaggagagcgcctccctttgaaagatgcgcttacttctcattttgaaataaccgtcttaacaaaaccgttcctgcaaaaggccgcacagtttacggctgaccaaaagctgagtgaacttctggacgaaggaaacgaagagcagctgaaagcgtacatcaacggccgtgatctgcttgatctcgtccgggatttcgggccgtgggaagcttccgccgaagactttctttccatcctgcgtaaaatgccggctcggctctattcgatcgcaagcagtttagaagcgaatccggaagaggtgcatctgacaatcggagcggtcagatatgacgcgcacggcagagaacgaaaaggcgtctgcagcattctgtgtgcggaaagactccagccgggagatacgcttccgatttacattcagcacaaccaaaacttcaagctgccggataatccggatacaccggtcattatggtcgggccggggacaggcatcgcgccgttccgttcctttatgcaggagcgtgaagaaaccggagctgaagggaaaacatggctgtttttcggggatcagcactttgtcactgattttctgtaccagacggaatggcaaaaatggctgcaaaacggtgttctcacaaaaatggacgtcgctttttcccgggattcggaggaaaaggtatatgtgcagcaccgcatgaaagaacaaagcaaagagctgtatgaatggctgcagcagggagccgccgtatacatctgcggtgatgaacagcatatggcgcatgacgtgcaccaggcgcttctcgatatcattcaggaagaaggcggcatgagccgtgaaaaagcggaaagcttcctggcagacatgcaacagaaaaaacgctatcagcgtgacgtatattgattttggtttgaaaggagcttattcagcatggtgaacaacattttaaaagcgccggaaggccctccaagtgatgttgaggaaattaaagaaaaaagcgattatttgcgcggcacattgaaagaagtcatgcttgaccggatttcagccggcatcccggacgatgacaaccggctgatgaagcatcacggaagctacttgcaggatgaccgcgatctccgtaatgaacgtcaaaaacaaaagcttgaaccggcttatcagttcatgctgcgcgttcggatgccaggcggcgtgtcaactccggaacaatggcttgtcatggatgaactggcgcaaaaatacggaaacaatacattgaagctgacaacgcgtgaaacgtttcaaatgcacggaattttaaaatggaacatgaaaaaaacgattcagaaaatcaatgcggcgctgcttgataccattgcggcctgcggagatgtcaaccgaaacgtcatgtgcgcttcaaatccgtatcagtctgaaatccatgcggaagtgtacgaatggtcgaaaaaactgagtgacgaccttcttccgcgcacgagagcctatcatgaaatctggcttgatgaggaacgggtggcgggcactcctgatacggaaacggaaccgatgtacgggccgctgtatttgccgcggaaatttaaaatcggaatcgccgtgcctccgtccaatgatattgatgtcttttctcaagatctcggcttcattgcgattgtagaagaaggcagacttatcggattcaacgtggcaatcggcggcggtatgggaatgacgcacggtgatacggccacttatccgcagctttcaaaagtcatcggcttctgcaaaccggagcagctgtatgatgtagcggaaaaaaccattacgattcagcgtgattacggaaatcgttccgtcagaaagaatgccagattcaagtacactgttgaccgtctcggtctggaaaatgtaaaagccgagctggagaaccgcctcggctggcagctggatgaggcgaaaccttatcattttgaccataacggcgaccgttacggatgggtgaaaggcgtaaaaggaaaatggcattttacgatgttcatcgaaggcggccgtgttacggactatgagaattataagctgatgacgggattgcgtgaaatcgccaaagtccataccggagatttccgtctcacctctaatcaaaacctgattatcggcaatgtctcgagccagaaaaagaaacaaatcagcgcattaatcgaacaatacggtctgacagacggccggcagcattccgccctccgccgcagttcaatggcttgcgtcgcgcttccgacatgcgggctcgccatggccgaagccgagcggtatctgccgaaattgattgataagattgaagccattgttgacgaaaacgggctgcgggatgaagaaatcaccatccgtatgaccgggtgcccgaatggctgtgcccgccatgcgcttggcgaaatcggatttatcggaaaggcgcccggaaaatataatatgtatttaggagcggcgtttgacggcagccgtttgagcaaaatgtaccgggaaaatatcggtgaagaggaaattctgagtgagcttcgcaccattctcccgcgctacgcgaaagagcgtgaggaaggcgaacacttcggcgatttcgtcatccgcgcgggcatcattaaagcgacgacagacggcacgaattttcacgaataagatgagcacttaaaaccaaggatagagacacactgacggtgcgttctctatcctttactaagcagcataaacgctgcaccgcgtcatgaaacagatgacgcagcttgcgaaaaagcctgttttcagagaaaacaggctttttctttttccggaaaaaatgtagctgaaggaaaaaaagttcgccgtgagcacgttatgagaaattttaaataaaaacgggtaaaataaaagaagaatggttgcgtgcggaaaatatattgaatctgcccgatcatcggctccggcctttggcaaaggcagagaacaggcaataatgatatgatgcagcagatgaaggaggtcatgctttggacatatttttagtcgtactcgtacttttaaccatcatcgcgatctcaaatatcgtaaatcggtttgtcccctttatcccggtgcctctgattcaggtggcgctcggtatcattgcggcgtcatttccgcaggggcttcattttgaactgaataccgaattattttttgttttgtttatcgctccgctgctttttaacgatggaaaacggacgccgcgtgcggaactttggaatttaagagcgccgattttgctgcttgcgctcgggctcgtgtttgccacggtgattgtcggcggttacacgattcattggatgattccgagcattccgctggctgctgcattcgggctggcggcgatactgtcaccgactgacgttgtcgcagtcagcgcgctgtcagggcgagtgaagatgccaaaaggcattctgcgtctccttgaaggagaaggactgatgaatgacgcatccggcctggtcgcttttaaatttgcgattgcggctgccgtgacgggcgcattttcgctggcgcaggccgccttcagtttcgttctgatttcagccggcggtttactcagcggtgtcgtcatttcttttttgattatccgtttccggctgtttttgcgccgcctcggcatgcaggatgtcacgatgcatatgctgattcaaattctgacgccgtttgtcatctatctcgcggctgaagaaatcggcgtttccggcattttagccgttgtggccggcggcatcacgcatgcggtggagcaggaccgtcttgaatcaacgatggtcaaattgcaaatcgtctcttcaagtacgtggaatattattttgttcattctgaacggtcttgttttcgttattttaggtgcgcaaataccggatgtggtttccgtcatctttaatgataccgcgtttaacaatatgatggtcatcgggtacattatcgtcattacgctgacgttaatgattctcaggtttttgtgggtgctgtttttttggaacggcaagtggttttttaacaaggatcagagcatttataaacccggcctgcgctcgactctgctgatttcggtttcaggcgtcaggggagcggtcacgcttgcgggttccttttccattccttacgtgctctctgacggctcaccgtttcctgaacggaatttgattctctttttagccgcgggtgttattatgtgcacattggtactggcgacaatcgtactgccgattttgacagataagccggaagacaatgtgaaagagaagaaagtcaaattgctgacagcgagacggaagctgataaaggctgccttaacggccattaaagaaaatatgaatgagacaaacaaaacggcttcttttgcggttattgccgaatacaatgagaaaatgaaaaatctcagatttcagcagtccaccgtcaaaaaccgcacgaaaaaagatgagcggaaagtccgcgcccaagggatacaggctgaacaggaagaactgctgcggctgattgagcggggcgaaataccggaagaaacggcagacagccttcaggaacggtttgatgaactggaagtgctgtatacgaatccgtttaaagtcggcttatctaagaaaaagctgaaacgcctgatgtactggatctttttcggtgaacaaaaaaagccggaaatgtcgattttaaatgaagaaggcctcatccgcaccacaagggttaaaacggcaaaagcggccattgaaagcctgaaaaaacacatgactgaagaaaataaagatgtgacgcttgccgtcatttccttttacaatcacttgattttcaggctggggcactcgtatcacgaacagagtccgagccgccgttttgaaaatcaaaaactcgaaatcaaactgcgggccgtgcaggccatccgcaacgaaatccaaacattattcgaagagcgggaaatttcccgcgatatgtcacatgagcttcgccaatacatcaatgatgtggaagcggccatgcttgacggaggtgaataaaaaaagtccggcatctgttcgccggactttttttgattacggacgatggaattcgacgtgatcgccgtcgcggtcaaaccagcctctgaaggcccagttgatccagccgccatcacctttgttggtgaagcttccgtcttcaaacacccaaatgccgtacgtgatgccgtcataaacggcggaaccgtaaaactgaacgccgttaaaatgatcttcatattcctggcttaaattaaacaccatgacgttatatttttgtccggaagcgtagaatgaagattccattaagtttttgacgaagccgtcacggttttgcgccgacttaatcgcgtcagcaatcgaattgccgatgccgagcaggtcaacgtcaatgtttaatccgacatcttttgctgagacatctgatgtttgctgcgccatgttttgaggggccgggttttcttttgcggatacaaaggacagaggagtcagagacaaagcggcgccaagggcaacggacattgggatacgcatacgtttcatatgatttcctccttcaattgtgtggtggctacagtagcgatttacccggacagttacccaactaaccgtaatttttgaaaaataggaaaataataacgtcagtggtgcttgggcactaaagatggtttttgtgataacgatgagcgtataattggtttcttacggcggaaatgtgagataataataaccgtttacataatgactagaaaggatggttcaacgtggcaaaaagcttaaaagatactgtaaagcttcataatggcgttgaaatgccgtggttcggccttggcgtcttcaaggtggaaaacggaagcgtagcggcggactccgtcgaagcggcaatcagaaacggctaccgcagcattgatacggcggctatttataaaaatgaagagggtgtcggcgaaggcatcagagctgcgggcgttgccagagaagagctgttcatcacgtcaaaagtgtggaatgaagatcaaggatacgagtcgacacttgacgcgtttgagaaaagccttgagcgcctcggcctcgattacctcgatctgtacctgattcactggccgggcaaggataaatataaagacacatggcgcgctcttgaaaagctgtacaaagacggcaaaatccgcgccatcggcgtcagcaacttccaagtgcatcatttagaagagctgctgaaagatgctgaaatcaagccgatggtcaaccagattgaattccacccgcgtctgactcaaaaagaagtaagagatttctgcaaagcgcagggcattcaagtggaagcttggtctccattgatgcagggacagctcctcgataacgaagtgctgtcacaaattgcggaaaaacataacaaatcagttgctcaagtgattttgcgctgggatcttcaaaacgaagtcgttaccattccgaaatccattaaagagcaccgcattatagaaaatgccgatatttttgatttcgaactgtcacaggaagaaatggaaaagatcagcgcattgaacaaagacgagcgtgtcggcccgaatccggacgagcttctgttctaagaaaaaacagccctttacggggctgtttttctttacatgaatgtctgtgtctgacgttttacgctgaacctgtatgcggctattaataacagggcggcggcgaaggctcccaaaatgatgatgttcagcaccaggctttggagcgtgcggccgtgctgcaattgatcgaccgtatcgagcacccagcgctgaggcagaaattcggcgattgtctgcaccgttttcggcataatattgctcggaaagaagcagccggcgagcaagcatgtcggcacgacgatcaaattcaaaagcgccgatgttgaagcgctgctgttggaaaaaccgacggcaataaaggcgattccgatcgcgcttaatgcaaacagcatcatcaggatgaacagctgccacagcgggaatgacggatgaatatgaaaagcggcgcccataaagagaacggcgaatagaatttggacggccatgataatgatattcaccgccgcgtttgccagtacatactgctttgatgtgatcggcgttgacagaagtctgtagtacgttctgttttcccgctctttaatcatcagttccgtcaggttgccggcggaatagagcataatgataatgagatacccgatgactgagtaagtcatttctttatgattcgatgtatcttgtaaaacagcagactccgtttgaatcggagaatgcttgaaatcggcgtacatcgcctgaaaggcttttgcgtctccgccggaagatttgccgattgaggcggcgctgttcatataattgtacaaataagagctgacatatccggtgacctgggcgcctttcagcgaggtcatgccgatgtgagccggtttcccgtcttttacgctttgggagaagcctttttcaaacgtaatgagcgcctccatttttcctgaagcgatctttgatgaggcggacgcagccgtttcctccgaaatcttcacatgatccagtccttttaaaaacgtgaccgtatcctgtgccacttctccgccgtcctgattgagaatgccgatattgagcgtttcggctccgccgttggcattggtcatgaaggagaggaagacgccgatcagcggagccccgatataaagaatgagctgttttttgctttttgtaatccctttgagagtgtgtgcaaacagccaccagaagtttttcatattacagtccctcccgtctttgaaacgtaaatgcggcgatcagcaaaaagagtgccgccaatgctgtatttaaaccgagtgcaggccatgccgctgatacatcatttgcgtaaatgatgttgttaatcgccttattgatccaggataagggcgacagggcggaaattcctccgccttcatatttgtaataggcgccgccgataatggacatcacctgaacgatgatgacggtgattaatctggcgctttcgggttttctggtcaaatagctcaggctgagcccgaagctgacggccaaaagaatttcagaaacgagaatcaaaagcacaaggcccatgtggctgccccaattcgcttttaagataaatttgctgaaggcgacaacggcaagaatcgtcagaacattcacagccaaaatgccgagcatctttccgagaaagatatcgcttttccggagcggggcggcgatcaggcgatctgcggtgtgccgtattctttccccgcggaataagctgcttgcaaaaatcgaggcgtacagcccgatcatcgtcgtcatggatatcgcataaaaatctttcgctttcggctctttcgctttgtgtaaagacgtctgcttcatataatcgcttttgatttgtccggcggaaggcgccttatgcgccttgtaaacggcggcgcctgctttgtactgattggtaaaagcggtcagcatgccttggacgatcgtgccgtttataccgctccggtcatttgtatagacttgaaaaccagtgttttttacagtgacgaaagcatccgcctgattttctcgaacctcgtttttgccttttgcctccgtgtccgctttttgaaaatagacatgctcttttttggcggctttcataaactcagtaaaatcatgagaaagagggccgtttgactggtccgtatatacgaccttgatgttcccgaccgtcacctctgaatcaaaggcgtttgataatgccgcagtaaaaatcagcatgaagacgatcggaaaagcaagcatgaaaataaaagtccgtctgtcgcgggagctgattttgatttctttcccggcgatgtgcagaatattcatttgcaatcctcctttcagtgaggtcagtcgcgcaggcttctgcctgtcagcgtgagaaataccgtttctaagtcaggggcctgttcctgcaaggagcggatttcaattcctttgtccatgaagtaccggatcaggcggtttaaattgttgacccctgtgtcagagctgattttcacgctgttttcttccagtgcggcggctctgacgccgggcagctcctgaatatcgccgaggctgatgccgtttccggatgacagctcaatcacgacgtccttcgtgtcggtaatgatggaggtcagctgttcttttgtgccttctgcgatgacttttccgtggtcgatgatggcgatgcgcgtgcatatttcttccacttcctccatgtagtggctcgtgtagatgatcgtgcagcccatttcattcagctttttcactgactgcagaatataatttcttgattgcgggtcaataccgaccgtcggttcatccatgatgatcagtttcggccggtgggcaagggcgcaggcgatattgagccggcgtttcattccgccggagaaatgcttcggcaaatatttgtgtttatcgctcaagccgacgaatgtcagggcttcctcgacccgttctttcagagccgcccctctcaggccgtacagcccggcgaagaacttcacattttcataggcgtttaattcttcgtaaatcgcgaggtcttgagggacgatgccgatattcattttcgttgctttgctatatttgaaaatatcttttccgagaaacagaatgtctccgcctgaaggttttaaaagacctgagatcatattgatcgtcgtgctttttccggctccgtttgcgccgagaaacccgaaaatctcaccttcttttacggcaagcgacatttggtcaacggcggtataatcaccgaatttcttactcagctgtttgagctccaaaatgttcatgtttccacctctatgtcttgtgatgttcttattataaaaaaaagaatgaacggccgttagtgcagctgttcattcctttgacatgagaatcttcatatttttcacatgaaaacattcacttattcaaccggaagcaatgtcgtgacggaaaaaccggccgtgccgtcaaaaataacggttccgcgcaggacggccgaccgttcttccataccgagcatgccgaggccttttttaaagcggacggcgccgtttccgttatctttcacttccgctttcacggctttattcagcacatggatatcaatgaaaatctgcgtggcatcggcgtatttcattgcattggtcaaggcttcggttacgttttcctgaatgactctccaatgcatttgcgtcagcctgtccaaatcgccttgatgcgtaaacggaaccggcatcccgtttttggccgaaaattcatcaataaacgttcttaatctgtgaatgcccatttgttcagcgggcggtttcatatttttcagcgtaatgcggatatcctctatgccctctttggaaatggtaatggcgttttggagcagttcagccgctttgtccggatgggagccgagcatccgtttcgccgcttccatctgaatgagcgcgcctgtcatggaatggccgattttgtcatggatggcttgggacaatctgtttctttcttcgagtttgccggtatactccgattgtttgatatattctgtgctgctgtgcagctgtttcgtcagtttttcaatgcttgagcgcatgctgtctgactgctcttcatattttttcagccgattgctggaccgggcggccaaaacgaatatcgccaagcagaacaaggtcatgatgatataagtcggaaggtcgccgtacgggataaataaaaacggcaaaaacacgagcaggcagaacacatagcggtgaaccggatattcggcaagaacggcaaaaatggcgggcggtaaaagaaatagaaacgccggatggcctaaggcggaaagccaggcggtcaatgccagcgccagcagggtgatcccgcgcctccaagcgggcggcctgatcatgcagaccccaatgcccaaagacagataaagcagcagaaacaagacggcgtacggtgtgtaaaggcggtctgccgatacgaacaaaaaagccgtataaaaaatggcgatcagtctgctcatcagcatccaaaaatccataccgttcaacgcccgttatccaccttcccggtgatataataaatcgcgatctgcgttctgtgctcaagccccgttttccctaaaatagaggaaatataattggccgtcgtcccttcagaaatgaaaagctgttttgaaatttccctgttcgagaatcctttcgcaataagcgacatgatgctgagctctctttcagtaaactggctttcatcaatctgatgcgcggcttccgccggccgggaaaggctgtcttttattttatccagtacggtgtcctgaagaatgctgtgcccgttgaagacgcttttgatcgcatcgcggatccgttccggttcggtattttttaataaatatcctttcgcgccgtttttaatcgcttctaaaatatactcatcgtcgtcaaatgtcgtcaggatcatcggcttcgtatccgtttcctccgcgatccgttttgcggcttcgacaccgttcatcaccggcatgcggacgtccaacaaggcgatatcgacgggattgtgtttacaatactctgccgcctcgagtccgttttccaacgttgccgatacagtaaattcctcatatgtatgcaaaatgattttcattccttctctgatgaaagaattatcatccgcgataatgacattaatcttcatggccgcaccctttgtgtgttttttgtttcattatataccatccgaatttaaatcaaaaagcctcccggcgaaaggtgcgcggaaggcggagcggtcaagcgggttttttcaattggatgaaaaacagcatcagaaaagaaatgatcacaatacagatcacccacacccaggcgagtgtttcattgccggagtccatcgcgacgtaaatcgctgtcggcagcgtttgggtgacgccgggaatatttcccgcaaacattaaagtcgccccgaattcacctagcgcccttgcaatactgagaatgcttccggtcaagagggagggaaaggcaagcgggacggaaatacgggtgaacacctgccacctgccggctccgtctactttcgccgctccctcgatgtcggcatcaaccgcggcgaagcccgttttagcggactgatacataagcgggaaggcgacaatggccgaagcgatcaccgcggccgaccacgtgaaaatgacgggctggtgaaaaatccgctcaatcgcccggccgaaaaagctgtgttttccgaaaatgataatgagaatgaacccgacaacggtaggcggaagaacga

SEQ ID NO: 33 - DNA, 20440 bp, Bacillus amyloliquefaciens
tattatagcgaaagaaagggaatccttaaacgtattttgttttttaaagagttttcccaaaaagtttcccgctgtaattattaccgtctaattgcccagttgtgttaaaatagaaaagttgaatcttcgtagaaaatggtgatgaggaaacatgtcaagcaaattgttaaggggcacgttcgtgctgacgctcggcacctatatatcgcggattttagggatgatttatctgatcccgttcggagcgatggtcggagcgacgggcggagctttgtttcaatacggatataatcaatatacactgtttttaaacattgccacgatgggatttcccgccgcggtttcaaaatttgtctcgaaatataactccaaaggagactatgagacgagcaggcggatgctgagagcgggaatgtcggttatgctcgtaaccgggatgatcgctttttcaattctttatatttcagcgccgttttttgcggaaacatctctcggcggcacgagtaacaacggacttacgattgaccacgtcgtttatgtcatccggatggtcagtctggcacttttggtcgtgccgattatgagtcttgtgcgaggttttttccaaggtcatcagatgatggggccgacagccgtttcacaggttgtggagcagcttgcccggatcatctttttattgggcgccacgtatttgattttaagagtgatcaacggcggccttgtcatcgcagtcggatacgcgactttcgcggcgctgatcggatcattcggagggcttgtcgtcctttatatttactggaataagcggaagggcgatcttctggcgatgaagccgaatctcgtcccgtctgcgaacttaagttataaaaaaatgttcattgagcttttcagttatgccgctccttacgtatttgtcggactggcgattcctttgtattcatatatcgatacgaatacgtttaataaagcgatgattgcagcgggccataaggatatcagccaggacatgcttgcgattgtcaccctttatgtgccgaagcttgtgatgatcccggtttctctggcgaccgctttcggtctgacgctgattccgacgattactgaatcgtttacgagcaggaattataagcttttgaaccagcagattaaccagacgatgcaaatcattctgtttttggttattcccgctgttgtcgggatgtccgtgttatcgggtccggcctatacgttcttctacggctctgaaagtcttcgcccggatatcggacaggatatattgttctggtacgcgcctgtcgcgattctgttttctctgtttaccgtaaacgccgcgatcctgcaagggattaataagcagaaatttgctgtcgtgagcctttttatcggcgtcattataaaagtggtgctgaacgtgccgctgatcaagctgtttcagggagacggtgccatcttggcaacggcgctcggttatatcgcttctcttctgtacggttttattatgattaagcgccatgcaggctattcgtatacggtacttataaaacgggttattttaatcgcagtcctgtccgtcgtgatgggagtcgcggtcaagctgactcaatggctgctcagtttctttgtaacataccaaagcggccaggtgcatgcggcgattgtcgtctttgtctgcgccgctgtcggcggtgcggtgtacatgtttgccgcgtaccgaatcggatttttacaaaaaatgtttggaaaccgtctgccccgcgttttgaggagaggcaggcattccgcccattaagaataatgaatagtccgcttatcgcgggcttttctttttaaaggagaggatcaggatgagacttgataagctgcttgccaacagcggattcggctcaagaaaagatgtgaaaaaaatcgtcaaggctggggctgtcatgattgacggagagccggcgaaagatgtgaaaacccatgtcgatccggaaaaacaggacatcacggtatacggagagccggcagactatcgtgaatttatttatgtcatgatgaataagccgcaaggagtgctgtccgctaccgaagacagccgccagcaaacggtggttgatctgctgacgcctgaagaacagcgttttgaaccgtttccggcgggacgtcttgataaggatacggaaggctttttgcttctgaccaatgacgggcagctcgctcatcgcctgctttctccgaaaaagcatgtgcccaaaacatatgaggtccggttaatttcacctctgtcaccggaagacatcgttcatctggaaagaggcgtcgtcattgaaggaggctataagacgaagccggcagccgttgaaatcattacagaaagcccggatgaaacggtgattcacttgaccattacagaaggcaaatatcatcaggtgaagctgatggcaaaggctgtcggaaatgaagtggcttatttgaagcggctttcgatgggggctgtttctcttgacccggatcttaaaccgggagaattccgcgagctgactgaagaggagctcgaaacgctgagaggcgctgaagtgtaatcgatatcagaaaagcccaaaacagatttgttttgggctttttatatagaggaacaaaaaacaaggcaaagacgctgctttgccttgcagcatgtcaggccgaaaagggccttatgtaattgttcgcttaagatgtaattttcactttttttcgtgttgtctcccacttgcctcggctaggactatgaacaagatcattgtatgctaacacatttaagtctcgctgaatggttctaggtgtaatgccgaattcatcaaccagttcctgtgttgtcacaaggcctttttcctggatgaacatgtaaactgatttaatccgagtcagcatacgatttgttgaaggtttcaaaaaaccactccctatcataagatcggatggacttgatataccacaactttcgactctaaaacttcgtacgaataagcaacaaaggatgacatctgttttttctcttttaactgcctccattatacacgatatggacgacatgaatctaggaataagcgcagataattttttccaaatgggtgccgccttggtgcattactatgtccggtccgcttttattattatggaaactgaaactttttttatacatgtccgtatgaaaacgggggagtgagaagtttgggagaattattgaatgcaaacattgtctgcgccggttatgctgacaggccgaaggtgatttctgatgtatctctgtcagtcaacgctggtgaaattaccggtttaatcggagcgaacggcgcgggaaaaagcacagtgataaaggcggttctcgggctgtcccgggctatagaaggcggtattgagtggaatgattcatcttatgcttacataccggagcgtccgagtttttacgatgaactgacgctttgggagcacctcgagctgaccgggtcattgcggggtatagaaggggaagaatgccgtgagcgggccgagcggctgcttgaagagttttcactgacatcggtaaaacatgatttgccttccggtttttcaaaagggatgcagcaaaaattgatgctcatacaggcatttttggcgaagccggatatttacatcattgatgagccttttatcggacttgatccgatctcaacaaagctgtttaccgacatgctgattgctgagaaagaaaggggcgcggggattttgatgtgcactcatgttctggatacggcggaaaaaatctgcgaccggttttatttgctggatcagggcgctctgcttcttcaaggcacgttagaggagcttcaggaaaaaacggggagccgttcactgctggattgcttttattcagcggttcggagcagtcagcgatgaccgggcgggctttgttttttcaaagactgtttcattattggcggtatcaatggaaggtgtttcagacggtcattgattggacggtcgcgctgtatatcgttcttcccgctgccgcatttgccgtttatcaatatgctgattggctgaacggcagggggcttcttaatggagcggcaggagtattaggatggggctggctgtatgtattcagtgccctgctgttgtgcacgggttttattcatacctttttgctggaagcggatcacgtatttttggtgcatgcaaaacatctgatgcaaaagctgaaaaggtacgcgcttttgtattcgatgttcctttcccttatcaaatggggtgcgcttgccgtattgttatttcccttatggcgccagtacggtgactgtaccttaccggcatattcaggtatgttttgctgtctgttcggcttccataccgcgatattagccgtacatcggcacagaaaaaacagcaggcggacattcgggaatcaggcggcgggctggctgaaagtgatggttctgatggcgggtgcgttttttatgatcgtctttgccgccgaatggtattggctttggccggcgggatgtatattgttcatctgttccgcccttttgacttggaaagggacggagacattatcagcctttgaggaagaagtgcttgaggagaacaggcgcaagctttctttcgcggcctttgttttgatgctcagccatgatgtgcagctcccgaatggtaaaaataaagggcggagcaagccgtttttatatcccggctccaagcacatctttacaaaacggtcggcgtatacggcgtggagagaattgttctttaaagtgctgatccgaaacggcgggtatctccggcagctttaccttttaactgcggcttttacggctcttattctcgttcttccgctcttagtgaagccggcagtcctcattttatttgcgatcgtcagccgctatgccgcgtcgcttttatttgaccggatcacggataaaccggttttaagcggtatcaagagagacagtgatgattatttccgggcgcgaaacagcgcattaaccgtcatccaagtcatctgttccgcctggtgtctcattgccgcgattctttccgttctttatatgtgaaaatccctttccgaaaaggaaagggatttttcttaatgtccgttcaaaataaaaagctgaataaaaaacagtacggcgaagatgatgactaaaggatggatttcgcgccattttttcttagctgctttaacaagcggatatgaaatgaagccgagtgcgattccggttgaaatactggacgttaaaggcatcgccaaaatgacgagaaaggccgggaacgcttcatcaagctcattccagcggatattcgataccgcgcccatcatcaggctgccgacaataatcagagccggtgacgtaatcgcggacacttccgataagacgctgacaagcgggctgaaaaacatggaaacggcaaacataacggctatcgtcagcgccgtcagacccgttcttccgccggccgccacacctgctgaagattcaacgaacgcggtcgtcgggctggtgccgaagatacttcccaccgtcgtagcggtcgaatcagccaaaagcgctcttctggcattcggcagctgattgtttttgatcaatcccgcttgttcggcgacaccgatcatggtgccggttgtgtcaaaaatcgtaacaagaagaaaagaaaacacaacggcgtacagaccgtgatgcacgacatccccgagggcaccgaacggatttgtgatcaaaagcccctccggcaggtgcgggaaggacatgaatcctttcgcgaaatggatctgcccggtcaaaaaggcaatgacggcggtcagcgccattccgatgaacagagccccgtttacattcagcaccatcagtacaatactgatgataagtccgataagcgttaaaatgacggcgggcgaatgaagatcgccgagtgcgacaagattagatttatcagccgtgatgattccggattggcgtaagccgataaaagcgataaataagccgatgccggtcgtaattccgtattttaaattgtccggaatcgcttctataagttgttttcttaaaggcgttaacgataaaataataaagatgactcccgcgataaaaacggcgctgaaagccgtctgatacgtaatgccgctgcctgtgccgacaacgtgaaaggcgagatacgcgtttaagcccatgccgggggcaatggcgatcggaaaattcgcagcgagagccatccataaagttccgacaatggaagcgataatcgtcgcggtgaacacctggtcaaacggaattcccgcattggaaaggatcaccggattgacgacaatgatatacaccattgtgaaaaaggtggtcaatcccgcggtaatttctctttttattgtcgtttgatgcttgtcgagatgaaacataagtacctccaatgacgaacattttttcaaaacatcatctatattattcgttttatcgacattttgcaagtctttatcaagaaaggggatttgtgatgaactgggaagttgaagtcatcagaaacaaagaagatctgatccgtgacacgcagaagtttttgcagatcaacagcgtaatggacgaatcaacagccggtcccggccggccgtttggagaaggcgtcaatgccagcctgacgtcactgctggaattcggtgaaaaagaaggcttcaccgtaaagaatcttgacggctatgcgggccatattgaatggggaacaggtgacgaaatcgtcggcgttttgtgccacgtcgatgtcgttccgcccggagacggctggacgagcgatccgttttcagccgatatcagggacggccggatatatgccagaggcgccatagatgataaagggccgacaatggcagcgttttatgcgctgaaaatcgtcaaagacatgcagcttcctttatccaaacgcgtgagaatcatcatcggaacggatgaagaaagtgattggagatgcgtggattactacttcaaacacgaaaaaatgcctgacatcggctttgctccagacgcggattttccgatcattaacgcggaaaaaggaattatagatgcgtcactgcgcattgcaaaaagcgcttctgacaaagacgcaaaaaacgggcttctgtcattccgttcaggactgcgcttgaacatggtgccggatgcggctgaagcggttattgaaggggacggtcttgatgccgtgcacgcatatttcagcaaatggcttgagcagtcaaaaacacaaggtgaagcagtttcggaaaatggaaaactgacgcttcgggtatacggaaaatcatgccacgcgatggaaccggataatggtgtcaatgccggcttaaagcttgctgaatgccttaacggaacggagctggatgaagccggaaagcactttgtcaaaaccgtcagtgactattttttaaatgatacacgaggcaaaaaactgaaaatcgattgcagggatgacatcagcggagagcttacattgaatgtcggcacctttacatacagaaagggtgaggaaggagaactcggcatcaacatccgttatcccgtcacttcagacagcaaattcatccgtgatgcttttacgtctgctgaagaactccggcttgaagaatttaaagacagcaaaccgcaccacgtttctgccgatcatccgctcgtaaagacgcttcaaaaggtttacgagggacagacgggaaagaaagcggatctgatttcaatcggcggaggaacgtatgcgagatccctttcggcgggcgtcgcgttcggaccgctgttccccggccggcctgacagcgcgcatcaaaaggatgagtacattgaaattgatgaccttctccggtcaacggctttatatgccgaagccatttatgagcttgccaagtgataataaaaagggacgccgaaagcggcatccttttttatcattcaaatgaccataaatccgttgataaataacgttctcccgtatcggccgtcatacagatgacgatctgttcggaagggaggcgttttgcggtttcaatggcggcgaagcaggcggcgcctgaagacgggccgacgagtataccttcttcccgggccagacgacgtgttgtcgtatacgcatcttcatcagatattctcatgatttcatcgtaaacgtcctgattcagtatgccgggaataaatccggggcttgtcccgacaagcttatgggctccgggttttccgccagacaggacgggggaacccgccggctcggcgacatgaacaatcatatccgggaaaagctccttcagcgtttctccggttccggtaatggttccgcccgttcccgccgttgccacaaaagcaccgagcggtctgttgagctgctgaacggcctgatagatttcaatggcggtcgtttttcggtgggcatctggattagcgccgttatcgaattgcatcgggataaaacttcccggaatctgttcggcgagttctttcgcttttttgatgctgccgggcattctttccgcccctggtgttaacacaacctccgcgccgtacgctttcaggaggttgatgcgttccttcgtcatcgtgtcaggcatgacgaggattgccttgtagccgcgcgccgccgcgttcatcgccaggccgatgcctgtgttgccgcttgtcggttcgatgatgacagagccgggttttaaatgcccgctgttttccgcttcaatgatcatattgtaagccgctctgtctttgacactgccgctcgggttaaacgattctaattttaaatagacctgtgctgcatgttctggctgaaggcgattgagctttacgatcggtgtgccgccgatcagctccgccgtgctgtttacgattttcaaggccggctcattcctttctgtataaaacgttcggtacataatatcctatcataatgagcggacagggttctcctctccgcttatccgttttataataacaccataaccaaagagggggagatcctcgtatgagagcttcattgccgcattattttatcggcattccgattccggctgacattgctgaaccgatttgggaagcagccaaaaaggagccggcgttatcattcaaaaaatgggtgcacccgcatgactatcatattacactcatttttctcggagccgcggatgaagaacggcttgcgaaattatcgtcgctgctcgcagatactgcgtcggcagcgcagccgtttaccgtacagtttcagcatctggatattttcggcgaccgcagacagccgagagtgcttcaccttgagcccgaacggaatgaactgctctttgatttgcgggaaaaaacaaaacaggctgttttgaaagccggttttcaagtggaaaaacggccttatcaccctcatatgacgatggcgcggaagtgggcgggagaccggccgtttcctgacgatgtgccgtttgaaagcggcagggtgcaaagtgccgtcagccggttttccctgtttcagacccatcttgatcggtcgcctaaatacgaagaaatcgcacagtttcaattgacataaacaaatattcggagtggagaaatcacatggcacagatcatcaaaattcacgactgcatatccagatatgaacttgatccatatcattatatgaaccagtttatccggctgaagaaagaacgctgggaggcgcttcttgaagcgtttgaccggaagacggaagaaaaagaaacggaaacggctgcaggcggggaaaccgatcaagcgccggccaggaaaaaattttccttgaaaaagagaaaagaagaaaatacggccgatataaatgaaaagaggcaccaatggtttgatgagccggagggagaagaggcgctgttcgggaatcttccgtctcgaaagtctgagctcgcgccttttttcaaagatcagctgtatgactttcaattaaaatgggcgagctccacgctttctcaaaagtctgagctttcgcaggcggtcaaaagggacaggatgttaaaaatgctggctcaaaagctgcccgattcctattttgtgatgtatcatccggttctgcaaattcagcaggcgtccgtcgaactgagcatgatcatcatctcgccgctggagatcttctgcgctgcttttatggaagcggaagaggacagcgtatatatcggatcaaaacaccgtttttgggaagaaaggggctccggcagcacgcgtcaagtattgaatccgtctctcagcctgcaccggacaggctcggtcgtttcgcaaatcgtaaaagaaaagcaggccgacattcccgtgcggaagcttttgctcagcagaacgtcttatattgattacccggagccgccgtacgggctggaaatagctgataaacggactgccgcagagtggctggaaaagcagcagaaaaatacggcgccgatcaagcaccaccagctcaaagcggcgaaggctcttttgtcttacggcttaagcaattcaagccggagacaggaatggcttgattaaaaccgacgtttgccggctgtctcttcatctatgaagcaggtgaaaacaaacgatgagtcaatggttttttattattaacccggtctcaggaggcgggcggggccggcgtgtctggaaatcagttcaaaaagagctgaccaggcgcggggtcagccaccgctcttttttgaccgggcatcccggacatgcggaggtgctggcgaggcagatttcaatgatgcaggatcataagcttaagcggctgttcgtcatcggcggtgacgggacgatgcatgaagtcattaacggactgaaaggaacggatcagattgagctgacctttgtgcctgccggttcgtacaatgacttttccaaagggcttggtattaagaaggcggcgcttctccaagaaatcaaaagtctgcaccgcccgctcacgcggaaattttttgcgggaaacatcaacttttttcatgacaaagcgcaatcactttattttattaaccacctgtctgtcggcttcgatgcctcagttttgaaggcagccgcgaattttccgttttcgcgcgttcttcggtttttgcgtctcggctttgtgatttacccgctcgcgcatttacatacagcctcggggtttcagccgttcagatttatttgcacggcagacggccagaggcgtgaattccgcaatgtctggtttgtcattgcggctaatcacccttattacggaggcggcatgaaagcggcgccttcagcaaatccccgtcaaaaccattttgatattgtcattgcagaaaacctgtcctttttctcgctgtatcgttttttatgggcgatgagcttcggccggcatatcaaaatggacggagtgacgatgataaaggggaaggaattcgtttttgaaacagatgggaaaattccgtttcacactgacggcgagctgatcggaacgacgccgtttcggcttatgccgggcggtgcgccgttgaaaataaaaacataataaacaaatgaaacccgtcaaatgtttcacggcaaagagcggttccggcataaatcttcagaattcacaggtgttcttgctagttttgcttgacgaagtttgtgctgtagcgctaaaatttataggacggctattgattagcatatgagactctcaatagctgtcttttttattctcatgaaattgtttatgacaggccgctccgccaatagagaaaggctggaggcctattctaaaatattttaagaaatgatgggttgaacattgatatgaactggttgggacaattactaggtagcgattgggagatcttccccgccggaggagctacaggagatgcatattatgcgaaacataacggccaacagctttttttaaaacgtaatagctcgccctttttagccgtgttatccgccgaaggcattgttccgaagctggtttggacgaaacggatggaaaacggagacgtcattacggctcagcattggatggcgggcagggagctgaaggcaaaggatatgagcggacgcccggtggctgagctgctccgcaaaatccacacatcaaaagctttgctcgacatgctgaaaagattgggaaaagaaccgcttgatccgggcgcccttttgtcgcagctgaagcaggccgtctttgccgtgcggcaattttcgccgcttattcaggaaggccttgcttatttggaagctcatgtggatcaggtgcaattcggtgaaaaagtcgtttgccattgtgatgtgaatcataataactggcttctgtctgaagacaaccagctgtatttaatagattgggacggcgccatgatagccgatccggccatggatctcggccctttattgtatcattacgtcgaagagccagcgtgggacagctggcttgggatgtacggcatgaagctcacggaagggcttcggctgcggatggcgtggtacatgttatcggagaccatcaccttcatcgcctggcacaaatcaaaaggaaacgacaaagcgtatcatgatgccatggaagagcttcatgccctgatgaagcggattgtcaagtagtcaggagtacgaatccatctgctccacccattgggacaaatggttttggtgctcctgaatatgcgtgtcgatggaatcggccgtgatgccggactggctgtagcggtagatgtcctcgagcacgttttttatatttgaatcaagcccggtgttggccatcagtgatttgatgacgcgctccagctgttcatactcggcaaccgtgccgcagcaatccaattgatggtcggccaatatgtcctttaataaccggacctgatgttcgcttgttaagcccatgattcatatacacatcctttctgtgtcatacattgtgcaaagcggtgcggttttatgcatcacatgagtgttccggaccggggagcctctttttttatgcagccggcgcctttaaaaggcgcttgcggctctttatgtttcatggtatgttgttactcgaaattatagatagaggtgtcaatcatatgagaatgcgccataaaccttgggcgaatgattttctggcagaaaacgctgacatcgccatcagtgatccggcccagtataaagggcgatggaacacggtctttggcaatgacaacccgatccatattgaagtcggtacgggaaaagggcagttcatttcaggaatggccaagcagaatccggatatcaactatatcggaattgagctgtttaaaagcgtcatcgtcactgccgttcaaaaagtaaaggacagcgaggctcacaatgtccgtttgttaaatatagacgcggaaacactgaatgacgtatttgaacggggagaaatcaagcgcgtatatttaaacttttctgacccgtggccgaaaaaccgtcacgaaaagcgccgtttaacatttaaaacgttcttgaaaaaatacgaagaagtgatgggcgaaacaggtgagattcattttaaaaccgataaccgcggtttattcgaatactctctgaaaagcttttccgaatacggcctgcttctgacggaagtcagccttgatctgcacaacagcgatccgaagggcaatattatgacagaatacgaagaaaaattctccgcgctcggccagccgatttaccgggccgaagttgaatggagaacaaaagacagactctgatgcgggagtctgtttttttatgccgccatttgctaccattacatcaggagggatcaagatggagacattgaatattgggaatatttcattaacatggctggacggcggtgtaacgcatatggacggaggagcgatgttcggcgttgtcccgaagcctttatggtcgagaaaataccccgtaaatgacaaaaaccagattgaattaagaacagacccgattttgatcagaaaaaacggcctgaatataatggttgacgcgggtatcggccgagggaaattctctgataaacaaaaaaggaattacggcgtaacacaggaatccaatctgaaacaatctcttcgtgaactcgggctttcctgtgaggacattcatattgccgcgatgacccatcttcattttgaccatgcatgcggcctgacggaatacagcggagaggagcttgtctctgttttcccgaatgcccgcattatcacttctgcgacagagtggcgcgaaatgagaaaccctaatatcagatcgaaaaatacatattggagagaaaattgggaggcggtacaagatcaggtcgaaacctttgagaacgagtatcagctgacagaaggcattacgatgcaccacaccggcggccacagcgacggccacagcgtcatcgtcttagaagacgaaggggaaacggctgtgcattttgccgacctgatgccgacgaacgcgcataaaaatccgttatgggtgctggcctatgatgattatccgatgacctctattccgcaaaagcagaaatggcagacgttcgcggcagaaaaagacgcctggctgattttctatcacgacgcgatttacagagcggtaaaatggggagaagacggcgaagtggctgcatctgtcagacgggagaaaaaataggcggatcgatgatttacctgtatgaatttcgggaataaaagcaaacctaagacaaattgctttgaaaggaagagacaggtgaatcaatttcaagtgacgaaagatggagaaatcaaaacaactctgcgcggattagaagtactttctacgccttttttaaataaaggggtggcctttacacaggaggaaagaaaggaactcggactcgaggggtttctgccgccgaaagtattgacaatcgaagagcaggcgaggcgggcctatgaacaattcagttcgcagcctgatgagctgagcaaaaatgtctacttgaccgctctccatgatcggaatgaaacgttattttacaggctgttaaatgatcatttaggcgaaatgctgccgatcgtctatacgccgaccgtcggcaccgcgatccagcgttacagccatgagtacagaaaaccccgcggtctgtatttgtcaatagatgaccctgaaggaatgcgcgccgcatttcagcagttcggaaaaaatgaaaacattgacttaatcgttgccacagatgccgagggcattctgggaatcggtgactggggcgtcggcggcatcgccatttctgtcggaaaacttgcggtgtatacggcggcggccggaattgatccgtcacgagtgcttgcggtcgtgttggacgcggggacaaatcaggaaagcctcttaaatgacccgctgtatgtcggaaaccagcattcaagagtgcgcggcgagaaatatgaccgctttattgatgagtatgtctcgcttgcccgggaaacattcccgaatgcgctgcttcattgggaagatttcggtacggctaacgcccgcggcatattgaaacggtataaagataaagtctgtacgtttaatgatgacattcaaggaacgggcgcagtatcgcttgcagctgttttagcgtgtgcgaaagcatcaaaagtgcctttaaaagagcataaagtcgtcgtcttcggtgcgggaacggccggtatcggaattgctgagcagctgcgcgaagccatggtgcatgacggattaagcgaagatgaatcctacagccatttttggtgtatcgacagaaacggattgttaacggatgatatgaaggacttgcgtgattttcaggttccgtacgcgcgctctgctgatgaagtgaaagagtacggccgcagcggtgaaggcggatcaattgatctggcggagacggtgcgtcaggccaagccgacgattctgatcggcacatccactgtatcaggcgcatttacggaagaaatcgtcaaagaaatggcctcacatgtcaaacggcccgctattttgccgatgtcaaacccgaccacattatcagaagcaaaacctgaagatttaattaaatggacggaaggccgcgcgcttgtcacgacgggaagtccattcccgcctgtcgcgtataacggcgttacctaccatatcggacaggcgaacaacgcgctcgtattcccgggactcggactcggcacgattgtgacaaaagcaaggctcattacggacaatatgttcgttgcctgcgcgaatgccatcgccggtatggtggacgtcggcaagccgggggcgccgatgcttccgaaagtggaggatctcaggacggtatcggcaactgtggcggtagccgtagcgaaagcggccattcaggacggtgtagcggaaatggaacccgaggatctgattcaaacggtgcaggatgcgatgtggcaccccgtatataaacgaattcggccgatgtaaccgaataaagcccaaaacgctgatggttttgggctttattttttgcttgtccgaattatgaggcgacagaatcaatgacatcgacaatctggcctgtttttgcattgaccataacttcatattgctccagttcgccgaatgccgaacgtgtcacgccggttttgtatacctggatggtttctccgtttacctggtagggctcgggctctgtgtaaatccatgatccgtctatcggcccgcgctgtttaaaagccgctttcacgatacggagcgctttttctgaagagatataaggtttcatcgcatactttttcactgcgatggcagcgcataatccgactcctgcacctaagagaaaatgacgtaatttcaatatgaagcacctccaattatgtcgtagtttttattatacagaagatgccagacggtgttaagtaaagcggcggttttccagcccattcaatttgagcgcttggaaaacggttgtttttctaataaaataaaagcattacatagaaatgaggggaaaatatgaatgaggaaacgaaaacgcttttccggacgctgacgcagcttcccggcgcaccgggaaatgaacatcaggtccgctcctttatgaaacgggagcttgcgaaatatgcggatgacatcgtgcaggacagactcggaagtgttttcggagtaaggcgcggcgctgaagatgcgccgaccgttatggtagccggccatatggacgaagtcgggtttatggtaacgcagattacggataacggcatgctgagatttcagacgctcggcggctggtggagtcaggtgctgcttgcccagcgcgtcgaggtgcagacggataacggaccgattatcggcgtcatctcaagcatcccgccccacattttaacggatgcccagcgcgcaaagccgatggagatcaaaaatatgatgattgatatcggtgccgatgacagagaggacgcggtcagaatggggatcagaccgggacagcaggtcgtgccggtctgcccgttcaccccgatggccaacgagaagaaaatattgtccaaagcgtgggataaccgctacggctgcgggttaagcattgaactattaaaagagctgcacggaaaagagttgccgaacaatctgtacgccggggccaccgttcaggaggaagtcggcctgagaggggcgcagacagcggccaatatgattcagcccgatctcttcttcgcgcttgatgccagcccggcaaatgatatgagcggcgataaggagctgttcggccgtctcggcgagggggtgctgctccgcattcttgacagaacgacggtcatgcaccgcgggatgagagagttcgtccttgatatggcggaaacgcacaatatcccttatcaatatttcgcttcaggcgggggaacggatgccggacgggtccacatatcaaacagcggggttccgtctgccgtcatcggcatttgttcaagatacattcatacaaatgccgctatcatccatgtcgatgattatgccgcggcgaaagaaatgctcattaagctggtcatggcgagtgacaaacagacggtcgaaacgatcagagaaaatgtgtaaaaaaataagcaggaccgcataaaggcggcctgcttattctatttcaaataaataagagagtgctttcatcgcttgattgacggtttcgaccgtgatattcgcttttccggaaagctctttcagcgggtgatgcagctctttcggacggatgagaatgagcggctttccttttgcgatggcataagaagcatccatcgcggtattccactgtttatatttctcgccaaacagggcgattacaaaatcggctttttccatcagcacttctgtacggaaattgttgatatcagaagctctggcgtcttttaaaacagaatcgggctgcacgcccataatctcttctccgatattgtctgagcgttcatggttttccatcgggccgacaaacgtaatcggcaggtccagcgctgttgctttttgtttgagctcatcccgccactcactgtggatttcacccgctaaatacacgacaaactgcatcttttgcccctccttatgtacatattcagattttcgtacggctacaagcaaaatggtaaacgaaacttgcttgataatgcaaatgaaatatgataatgatattgcatatagttggtcttgccgtacacagtctggtatgatccaattggacaaacatcagcatataaaaaactcataatccagatggaggaatgacaatgaaaaagattgaaagcacggaagaattgcaaaaagcggtacaagacgattgggcggtatttatgttttcagcggattggtgcccggactgccgctttgtggagccgtttctccctgagctggaagcggactttcctgaattcacttattactacgtagaccgcgatcaatttattgatacatgcgcggaatgggaaatttacggcattccgagctttgttgtgtttaacggaggaaaagaagtgaaccgcttcgtcagcaaagaccgtaaaacaaaagaagaaattgagcaatttttaaccgattcccttgctaaagcataaaggaggccacgggctttgaaaatgacctcaaggaagctggcggatttattaaaacagcgcctgcagcacgagaaccgatccttcttttttgacagagaaaaagacaccctccgtgttgaggatcaaacgaccaaaaaaggcatcacattggagctcccgccgatcattgcgaagtgggagacgaaaaaagaagaagcgatcgacgaaatcgtctactatgtgtcagaagcaatggaggcgatggaaggcagcggacaggagatgtccggaaaggaagccggaatctatccggtcatccgctccacatcatttcccgatcaaacgagcgacggcattccgctcgtgtatgatgaccatacggccgaaacaagaatctactacgcgcttgacctcggtaagacgtaccgcttaattgacagccggatgctcgagaaagaaaactggacaaaagaacgcatcagggagacggcgtcattcaatctccgctctcttccttcggtcgtgaaacaggatacggttgcggacaattatttttattttttcagggcgaatgacggctatgacgccagccggattctcaatgattcgattcttcatgaatacaagcaggccgctgaaggcgaattggcgatttcaatcccgcaccaggatgtattaatacttgctgacattcgaaatgaatcgggttatgatattttagggcaaatgtccatgagcttctttgcaagcggcacggtgccgattacggccctttcatttctgtataatgaaggcagactggaacctgtgtttatcatggcgaaaagccggccgaaaaaggattagaaaggatttttcttatgaacgctttttacaataaagaaggtgtgggagatacgcttctgatctctcttaaagatgcagcacgcgaagaaatcggctatgaaagagaaggcgatgtcgtcagaatctttaacaaagaaacaaaagaaacgacgggctttaacatttttaacgtgtcttcttacttacagattgaggacaacggccccgtcgctttgtctgagacattcgttcaggatgtgaatgaaatactgaacagaaacggcgtctcagaaacgctgacggttgacctttctccgaaatttgttgtcggtcacgttgaatcgaaagaaaaacatccgaatgcggataaactgaatatctgccaagtgaatgtgggagaggaaacccttcaaatcgtttgcggcgcgccgaacgtggacaaagggcaaaaagtcgtcgtcgctaaagtcggcgcggtaatgccgagcggacttgtgattaaagacgctgaattaagaggcgttccgtcaagcggcatgatctgctccgcgaaagaactcgctttgccggatgcgccggcggaaaaagggattcttgttcttgaagacagccgcgaggccggcgaagcatttcaattctaactcccataaataagcgcacagaatcgaatgatgtgagagaaagccgttaagcagg

SEQ ID NO: 34 - DNA, 109859 bp, Bacillus amyloliquefaciens
ataaaacctccccacttgctgattgttttgttcggtacactgatatcagctgaataataaagttcgggatcccaccgttcaatcggcacttcccggatggaatctttgccgctatttatgttttcccagaattcttgataatgatctgcatcggggaatctgcaagcaaccccgattatcgcgatatccgcattctgtttattcaaatgaaccattggcctccacccgctccttctttagtgtagaaataacgtatccaatctgtgccttagcagactttcggtctcattcatcaatttttcaccaatgtcatcgacatgtctgtttctccatgattccaaatccgtgccctttacccaatgattaaaagcgcctaaagacgggccgcagtgaacttggaaattcaccttttgttcttcctgcccttccaaagcaagcagacatcctctttgcaaataccacttaaatagtaacagcatcttatatttttgattgcgctcagctttttgggccaggttcggctgtttatctattatgatttcgtagatttcatcaaaagtcttgttaaaataatcattttcgagctgaatctttgtcttttcatctatctcactcaaagactcgtattgttggtagatttgaaataatttatttgccctgaccggaaacagcgtgccctttttcagcacctgaacctttgttccgaactcaaacagagtctccgaaggcgcataagcagtatcgcatattcctgtctcactcagcatttctttaataaaaccgcttgtttcggcttcaactgtacattgattaatggatcccgtcataataaaatcagcgcccattaaaaaagcagacgccgcagactcgggagtcccgattcctcccgcagccccgatccttatcttccttgcgtatttgtgtgtttccatcatttcatcccgcaggttaacaaaaaacggcagcatcgccgtcaatgagccctgttcagtattactaccgcaatctgcttcaataatgatatcgtctgctgccggaatacggctgagccactccgcctgctcttccgtcagcataccgtgctgacacattctctttacgatactttgaggaggcggactcagaaatgcggccgcaacttccggccgtgaaactttggcaatgatccgattatgaggtataaccctgccgcttttgtctatcttcaactgatgcgccttgtaataaattaatggtgcgctgacggaaagatacgaagacgcttctattactcgtacgtcatgcttgatatataaatctatcaattccttttctctatcttgatgatccggctcaaatcgcagattcattccgtagggctggccatttttgagtgtctccttaatagaaataagggcctgttcaatttcccttataggtaaacccgctgtgccaaagaaccccagcattcctttcttcccgaggcggatcagcatttcagcggaagagatccctctatgcatcgcacctgccaaatacgcgtatgtcaaaccgtaatcttctttgaaagattgatcacccaatcgggacaccggtgaagctgcaccgctctctatattttcggccaagaggctatgctctttcccgctttccgaattgtcctcgttcccttcagaaaaaaagagactgtcttccggcgcactgatagtaagcggttcctcatctctttgtatggtgtgaattaatttagtcagaatgttgccgggaccgatctcttcaaacacagttacgccttgtcccattagatacctgatgctttcagtccatttcaccgagtttgttatttgttcaattaaattccgtttgatatcttcttgtttataaggtcttgccgtatagttagagatgaccgggaaattcaattcagaaaaatgaaactcctcgatgaattccgcaaattcacgctgtgcactttccatgaaacgagaatgaaaagctccgccgacttgcaatacgatataagctttcgccccttctttttcaaaaaaagaggctgcccgctttatctcatctgcagcccctgctatcacaatttgtgaagatgtattgtaattggcgatatctatttggccgaattcatacttctgaagtattttttttatgtggtgctcatccagtccgatcacggcagccattccgccctcggaagcctcactcattaactcgcctcttttagcaaccagccggagacctgtctcaaaattaaaaacgccggccgcaaaaagcgcagtatattcacccagactatgtcctgcaacagcatcagggcgtgtatgaccttcttttaaaccctttaaatattgcagtgcgctcactgtataaattgcaggttgtgtatacttcgtatcagtcagcctctctttttcatctgaaaggcataaatcctttatggaatatcctaaaatataatctgcctttttaatgagctcactgaattcatcgaataagtctctgcccattcctttaaactgcgctccctgtccgggaaagacgtaagcaagcatttgttttcctcctgttccgtatttctgccgtttcttttcgttccgatttgattaacgtttttcacttcaattttaaaattgtcgtttactctcagcacacttacttaataagcattactaagcaaaataaaaaaacctttatgccggataaaggtttaaaagcaaaaagcatgtacaaatatcatattgccgtaaatataaatagatagaattttctgataattaaaatcacattttcattctgttttatatatatcaatataataaaaacattccaacgtgccgaaacaacgattggttttatgtgaatatttccctaaataaatactataccatgatttacttgttgtcaatgggaaacacacgtatataccaattcttcagccgcctttttacaggcggctgaactcggttgttatcagttcatcagcccatgccgatatgccttcactatactatttgcggaataatagttctttctctttgttgtagtctttagtaaattgattgaactcatctgcttgtttatgcaccttttcgtaaactgagtttactttgctgatttgctcttccagctgcgctaatgtgagctttttatctttaatcagtttataaaggtccttatcaagtgaaatggctttttcgtactttttgtacaaaagatcataagatgcataccttttccccattaaagcgacagcatgcccggctttttcttttactttcttatcctttatttcttgagaagtttttttggcggattcaaacgctttttttgaatcatcaatactgtctttttctgctttcagatgtttttttcgctgatttgcattgctcagagcctgatcagacagtgtgacaattttctggtaatcatccatattcagtttaaccgcgctgtcgtatagctgatgctcttttttctccaatttttctaatgttttctgctctttttgaaacggtttttccgcttgaacggctttttccatcgagtcatgaagcgattcaaccggatcttttcccccgcagccggcaagcagcatacttgcggcgccgagcgctccgattcctgctaatacctttttttgaatcatattcacttaaaatcccccaatcttgacaatttccactatagaagcccgaacgctttttgacaatagctgagctgtaattgacatgaccgggtaaaaagacgcttacggtgctgtcaaagaatacttgcataaaaaattgagaaaacagggcggatgaccatacatctttttggcttttacatagtttatagtagacgccggccctgctgacagagggtcagcgtaattaaaagaggaggtttttttatgtacggatatggatttggcggcggatttggcggcggttgctgcggcggcggatatggttatggcggcggttacggttacggctgcggcggcggttacggccgcacattcgcattaatcgtcgtattgtttatcttattaatcatcgtcggtgccgcttatttaggctgcggctgctgaccctatacaacatgaacatcggccggcctgctatggccggccaattgtttcgttgcgccgcgataaagaaattcgctataatttacatattaagctttaggagtgaagtttcttgattactatggaaaatattgtacgcgacggacatcccgcgctcagagagatcgctgaagaagttcagcttcccgcttctgacgaagaaaaacagcatcttgctgatatgattgagtttgtgaaaaacagccaaaatcctgaattagccgagaaatacaagcttcgtccgggcgtcggtcttgccgctccccaaacagacgtaaaaaaacggatgatcgccgttcatgcagaagatgcgaaaggcactttatacagctatgctctttttaaccctaagatcgtcagccactcagtggaaaaaagctacttgacgagcggagaaggctgcctgtcggtagacgaacccattcccggctatgtgccgcgctacgcccgcatccgcgtaaaggcggtgacgcttgaaggagaacagattgacatccgcctcaaaggttttccggccatcgtgtttcagcacgaaatcgatcatctgaacggcgtgatgttttacgaccatatcgataaagaaaatccgttcaaagaacctgaaaacgccattgccattgaccgttaaaaataaccggcacttcccaaagtgccggttttctttatttcaaaaggtccagttctttgacggcccagctgattccctcttcatccaccggctttgtgacgaaatcggcggcaccttttaattccggaaccgcatttcccatcgccaccccggtgccgacaaaacggatcatctcaaggtcatttaatccgtcgccgaatgcataagtgtcacttacgccgtacggaagccgctcaagcactcttttaatgccttccgcttttgaaccgcctttcggaagcacatccgttgacaattcgtgccagcggacgtaatcaaactccggaaaagcggcatatgctttttcttcgtgtccgcggcagaataaaagcagctgataaatttcttttcctttataaaaagtttcatcaacttcgggataaggcgctttcagactgccgattccttccgagacgtgcggatgtccggggacggtcgttttcatcgtgtcttccgccataaatacgacggggtgctccccttctgccgcctgctttaataaacgcgcaaccgcatcttcaggaagcggatttttataaatgacctcaccttcaaatacgacatactggccgttgtatgaaataaatgattcaatctcaagctcttccagaatcggttttaccataaacggggaccttccgctggcgataaaaacgtgatggccagcctctttaagcgccttcacggcgtttcttgcgctatcgggaatatgtttatcatggtcatagatcgtgccgtcaatatcaaaaaagatcagttttggattcatgtcaatttctcctttttcccgtttatcagtcgtgtctttttcaatatcatcatacagaaagtttttcttccggaaaaccgccttgatgaaattccagttttacccacgaaaacaaattcattttttccgcatactacttctataaagggctttaaaggaggtatacgatgctgcgccgattacggaagaaactcagaagacagtggggcggaatgctccggaaaaaagtcatcgcgtagaagggatctttcgttttttgaaagtcccttttttgctcgagactttccttataatccgttttcgaatataatagaataagcgagtctaacatacggcatttaaggagagatttggatgatttataaggtattttatcaagagaaggctgacgaagtacctgttcgggaaaaaacagattcactttacattgagggcgtttcagaacgggacgtcagaacgaaactgaaagatcagaaatacaacattgaatttgttcagcctgtggacggtgcttttttagaatatgagaagcagagcgaaaattttaaagtattggagttatgagcggaatgaaatttgtaaaaaatgaccagactgccgttttcgccctcggcggattgggcgagatcggaaaaaatacgtacggagtgcagtttcaggatgaaattgtactgattgatgcgggaatcaagttcccggaagatgaacttctcggcattgattacgtaatccccgattacacgtatttagtaaaaaatgaagataaaattaaaggtctgtttatcacccacggtcacgaagaccatatcggcggtattccgtacctgctcagacaagtaaatattcccgtttacggcggtaaactcgcgatcggcttacttcggaataaacttgaagagcacgggctgttaagacagaccaaattaaacatcatcggtgaagacgacatcgtgaagttccgcaagacatctgtatccttcttcagaacgacacacagcattccggattcatacggaatcgtcgtcaaaacaccaccgggcaatatcgtacataccggggactttaagttcgatttcacaccggtaggcgaaccggcaaacttgacaaagatggctgaaatcgggaaagaaggcgttctgtgcctgctttctgacagtacaaacagtgaggttcctgatttcaccatgtcagaacgccgcgtaggcgaaagcattcacgatattttccgaaaagtggacggcagaattatatttgcgacattcgcttcgaatatacaccgtcttcagcaggtgattgaagcagccgttttaaaaggcagaaaagttgccgtattcggacgcagtatggaatcggctattgaaatcggacaaaatctcggctacattacctgtcctaaaaatacgtttattgagcataacgaaatcaatcgtttgcctgccaataaagtaacaattttatgtacgggaagccaaggtgaaccgatggcggcgttatcacgcatcgctaacgggacgcaccggcagatttccattaatcccggagatacggtcgtcttttcttcctctccgattcccggaaacacaatcagcgtaagccgcaccatcaaccagctgtaccgtgcgggcgcagaagtcattcacggttcattgaatgacattcatacatccggacacggcggacaggaagagcagaaattaatgctccgcctgatcaaaccgaagttctttatgccgattcacggtgagtacagaatgcagaaaatgcacgtcaaactcgcgactgattgcggtatacctgaagaaaactgctttatcatggataatggcgaagtgctggccctcaaaggcgaagaagccgctgtggcaggcaaaattccgtccggctccgtttacattgacggaagcggaatcggtgatatcggcaatatcgtgctccgcgaccgccgcattctttcagaagaaggccttgttatcgttgttgtcagcatcaatatggacgactttaaggtttcggcggggcctgatttaatctcaagaggttttgtatacatgagagaatccggtgatttgatcaatgacgcgcagcagctcatttcgaaccatctggagaaagtaatggatcggaaaacaacgcagtggtccgaaattaaaaacgaaattaccgatacgcttgctccgttcctatacgaaaaaacaaaacgccgcccgatgatccttccgatcattatggaggtctaaaaaaaactgcactcattacgagtgcagtttttttattgcagcggaatatgctgaaaggctttgacatcaaacagaccggctgctgtcattttaatatccggaatcaccggaagcgctaaaaacgataatgtgagaaacggattgaaatcaccggtgaatccgagcagaggaagcttctcatgaagcacgcccaagctgtcattgacccattccgccgacttatcagacaaaagcccggcgatcggaagcggaacggaatgaagcaattctccgtttttcacggctgttaatcctcctccggtgtcacggagcctgttgattgcttttgccaaatcggcatcgtttgtaccgacggcgatgatattatgggaatcgtgagaaatggttgtggcgatggcgccttcttttaacccgaacccttgtacaatcccgagtcctaacattttttcgccgctgtgccgctctgcgacggcgatttttaataaatcattttctgtatcaggacgaaacgcgtcagcagacggtgcaggcacttctttttttctcgtctccaaatgattcggtatcattttgattacattcattttcttgccttcttgaatcggtatatgaaaatccgattcagtcagcggcgctttcagccgcactgtatccaacagcgcctggtccggcgaataggaaccggcagactgttcataaaccgtgcgtccgttctcggcgacggtccggccggcgaccatggtcttcgtgacggcagcctcccgtacatctgaaatgaacagcagatctgcgtcaaaacccggcgctaccgccccttttgtttcaaggccgtagcactcagccgcatttaagctggcgagctgatacgcaaggaatggatcaagtccggcctttatcgccattttgacttggtggttcacacttccttctgaaagcagatcatctacatgcttatcatccgtgcaaaagaaaaagcgccgcgcgtttttttcattcaccgccggcagcacattgagcgtatttttcgccaccgatccttcgcgcagcatgacatacattccccgtctgattctgtccagcgcttcttcttttgtcgtcacttcatgatcatttgacaccagtgcggttctgtatatattgatgatctctgaagacagtccggctaaatgcccgtcgatccgttttccgtgacgcttggcatcaagcagtttctgaagcatatcctcttcaccttccgcaacagacacataatccattacttccgcaagtccgagcacctctttctcctgataaaaaggctttaaatcctcggcttttaatacggctcctgagcgttcaaagctagcggcgggaacacaggaaggaagcatgaaacggatgttcagcggcgccttttttgcctgctctatcataaatgaaatgccttttgctccggaaacgttcgcaatttcatgaggatcagtaatgacagtagtcactccgtgtgggaggacggctttagcaaattcaatcggagtaaccatagaggactcgatatgaacatgtccgtcaataaagcccggaacgatcatttgaccttctgcatcaatgacttcttccccttcatattcgcccaggccgacgatcactccgcccgtaatggcgatatctgcagaaatccattcctggttaaatacatccatgatttttccgtttttaatgacggtatcggctttttgtctgccggctgatgcgttcagccgttcagccagtgtttctttgttcaaaatgaggcctcctctttttctttatatggtacaatatgctatcggatcgcctgatcatagtcaataaaaattgcagaaaataccgcttacatgataaatgtctttctattctgacataataaaagaccgtccttttacggacggcttttcactttgtgtgaagcactcttttttcaaatcgggaaatgtccgtaagagagccgataacgatgagaatatcttctttttggatcatttcagtcgccaggggagatacgatcacttctttttctctcttgatggccacgatattaatgccgtacttcgcccggatgtccagatcaagcagtgtgttgcccgcaagcctgctgttggccacgatctccacaatgctgtgttcgtcggacagctccaaataatcaagcacattatttgatacgatgttgtgggcgatgcgttttgccatgtcacgttcagggtggacgatgtggtcggccccgattttcgcaagcactttctcatgataatcgttctgcgctttaaccgtgatcgtgttcacgccgagttcctttaagatcagcgtcgttaaaatgctcgcctgtatattttcgccgattgccacaatgacgtggtcaaagttgcgcagccctaagtttttcagcactgattcatcggttgaatcgccgatgaccgcgtgtgatgcgattttggcgtattcatttactttatcttcatcaatatccatcgccatgacctcaaggccttcttcacttaatgctttgcaaatacttccgccgaagcgtccgagaccgataacggcaaactcttttctcataacagtactcctttaaacaatatctctaatagggatagtatcacattttcggcaatgagttcatatagcgtttaagcttttctgaaaaggcgggcgataaatacaggtccgctcctcgttcgatttcttcctggtagtgacccggaggcgcaatttcctcagctttatcaagcacaagaaacgtcaggacgcctctgtatacacggccgccggcacacacttctatgaacgcgggacggtatgtgtggttatcaacaccttctcttttgtacagataggttgccgcttcaaacggaagcttgtacagcacgccttcagttcgtcccccatcttcaacaagatcggctctggaaccgtcaggacgccttaacgtgaatctcgtcgaatacccttcaacaaccgcccctccgaccggctcggcaaaaaagtgatcgacccccgcctgtttaaaccgggcattgtccatacaggagccgtatgcgaaataataaaccggactgtcatcctcccgtttcataaaacggtattctttccagtctccgcttttgatacggctgaatgaggcacactggtcgggctttacgacatatgcgaaggcggttttattcccggcatccgtcgtcacggcaacctctttccgatcaaaatcagcataatacgcatccagcttacggatcatctgatgatctgtttcatacaattccccgtacacaaaagctgtttctgctaaagacgccgcaggctgacctttatccgtttcgtacagcacgccgtttatcgcagcctgctcgcacacacacggagcgcccttcagcagttcatgattttcttcacgcttccgtaacaaaccgtatacaaaaagaagcaagttatttttcctccttttggacagcagccgcttctaacggcagaatcacctgaaacgtactgccttctccatttttgctcttaatgttaagtttaccattatgctccttcagaattcgtaaacaaatcggaagaccgagacccgttccctgatcttttgttgagaaaaacggtttcccgatgttttcaagcttttctttcgacatgccgtttccttcatcctgtatgctgatcaccgcgtattcttcatcccgttttgtataaatatgaatattcccgccgtcaggcatcgcttcaattgcatttttaataatattgataaatacctgtttcagctggttttcgtcaccgttgaccatacaggactcagtctgcctgaaatccttctcaatcacagtgttcgacagcaccgcgttcgtgtcaagaagcgtcgccacctgccttaaaatatggttgagatgatgagcggtaaacgtcacggtctgcggcttggcgagcagaagcagctcccccagcacgagatcaatccttttaatctccgaaaaaataatatcaaaataatccgttctttccggatactgggctttcatcagctggagaaagccgctgactgacgttaaaggatttcttacttcatgggcgattcctgccgcaagctccccggcaatggccagcttttgagattgcatggcaaggcgttcgttcgtttccagaagctcgtcgaccgcttttttccgttcactgatatcagacatcgtccccaggcttccgacaaatttctgtctgcggtcataatacagcttataatggacttctccccaaaagatcgtgccgtctcttttaatatatttggccgtaaacattcctgacggggactgctgcttgatttgggagataatataatcaatgatatgtttttcttttataaaataatcattatacatcgtgcccatacattcgctgatggagtggcccgtaatcgccgtccaggcctgattcaaatatgtaatattcccttgtgcatccgtctgaaaaacgatttcctgcagattgtccatgatccggtttttctcatctgaaagcgcctttgctttctgctcgctgtccttcagctccgccagcagctgctttttattatccacataataagccagcagccagacgctgattaatgtgacggcggtaaaggtgatgtcaacgggccagttaatcggattccgttcaatcatataaaataaataatcccaaaacataataaaaatcattgccaagattaaggaaatgatacgcgcttgatattttcccatagtcccacctgccgctagcatttctacatatattgtaacattgttgactgcattattgactaaaaaatgataactattcccaattaattgagcaggttcgcttacttttcccgtgagtttttgcacaagttcataataaaaggacggaatgatgctccgccctttttgctgattatgatctatcttttaacgcttcctcgatttcctcaagcagcattttcgctccttcaggacttaaaataattttgccgttgccgtactcctgattttcgggagtaatttcccccgtcattaagcaaatgccgtgcggcttgtattttttcaagacaattttgtctccgtcaacgaaaaattcaatactatctttaatagcgatatccaatgctcttctcaattcaatcggcatgacaatacgcccgagttcgtctacttttcttactacaccaattgatttcatagaaatcccctacttcctttaatgtctcttctttatgtccaaggaaaatccttcataaacgtagacgaaaggaacagagcaaaagtttctcagtatccggaactgaatgtttttttacaaaaagaaaatccttttgaaatatgggatacagactttccctccttttttacaaaaacatttcattcccggcggaaacccccaaaaatcgtgttttttctcagaaactttaaatgtagaatcaattaaatcaggatagggattgggtgaaaacatgtttcaatcaactgagatcggaatcgacttaggaaccgctaatatacttgtttacagtaaaaataaaggaattattttaaacgagccttccgttgtcgctgtagatacaacaacgaaagcggtgcttgccatcggaacggatgccaaaagcatgatcggaaagacgccggggaaaatcgtcgccgtacggccgatgaaagacggtgtcattgctgattatgatatgacaactgacttattaaaacacattatgaaaaaagccggaaaaaaaatcggaatgaccttccgcaaaccgaatgtcgtcgtctgcacgccttcaggctcaacagccgttgaacgccgcgccatcagtgacgctgtcaaaaactgcggagcgaaaaacgtccacttgattgaagaacccgtagccgctgcaatcggggccgacctccctgttgacgagccggtcgcaaacgtcgtcgtagatatcggcggcggtacgactgaagtcgcaatcatctcattcgggggcgtcgtatcctgccattcgatcagaatcggcggcgaccagcttgatgaagatatcgcctcgttcgtcagaaaaaaatacaacttgctgatcggggaacgtacggcagaacaagtgaaaatggaaatcggatttgcattgatcgaacatgtgccggaaacgatggaaatccgcgggcgtgaccttgtaaccggtctgccgaagacaatcagactgcagtctaatgaaattcagcaggcgatgcgtgaatcgctcctgcatattcttgaagcgatcagagcgacacttgaagattgtccgccggagctcagcggtgatatcgttgaccgcggcgtcgtgttaaccggcggaggctcccttttaaacgggatgaaagaatggctgacagatgaaatcgtcgttcccgttcatttggcggcaaatccgcttgaatcagtggctatcggcacgggacgttcattagacgtcatcgacaagctgcaaaaagcaattaaataataagattgtgcttcttttttctccagccggctcatattgtgagaactggagaaacattaaggaggaagcatatgcttagagatgtgggaagacgcgtagcagtagccgtcattttaagcggaattattttggggggtatgagcatttcactggccaatatgccccattctccggccggcggtgccgtaaaactgaatcacccgtaaagacgcagcaaaagctgtgtctttttcgtttgtgctcctttctttcctttatgaggcgatatttgatatgatgagaaaaaccgatgaggaggaatgaacgatgagttcgtttactgaaaagttacatacatatgctcagctggcggtagaagtcggcgtcaatgtccaaaaaggacagcatgtcgtaatcaatgcctcaactgatgtccgggaacttgtcagactgcttgccaaacattcttatgaaaaaggcgcaaaaaacgtcaccgtaaattggcaggacgatgaactgtccagattaaaatacgagatggcaccttttgaagcgtttgaagagtatcctgaatgggaagcaaaaggcaaagaagagctcgcgaaaaaaggggctgcgtttatttctgtcgtctcatccgaccccgacctgttaaaaggcactgacggcaaacggattgcagcgttccaaaaagccgccggaaaagcattgcatacatacagacaatatattcaatcagataaggtcagctggacggtgatcggagccgcttcaacaggctgggcgaaaaaagtgttcccggatcagccggaagaaacagccgttcagcttttatgggaagaaattttcaaaacgacccgcgtaaatgaagaaaaccctgtggaagcatggaaaaaacatgatcaaaaccttcatgaaaaagtggaacacttaaacaaaaaacattacagcgccctgcattatcaggctgaaggaacagacttaaccattgaactgccgaaaaaacatgtatgggcaggcgcgggaagcgtgaatgaaagcgggcacgaattcatggccaacatgccgacagaagaggttttcacccttccgcagcgtgacggggtgaacggcacggtttccagcacgaaaccgctgagctacggcggcaacattattgataacttcactcttacctttgaaaacggccgcattgtcgatgtgaaagctgaaaaaggcgaggagattttaaaaggcatcgtcgaaaccgatgaaggctcacactatctcggagaagtggccttagtgccgtacgattcaccgatttcacaatcaaatattttattttacaacacactgtacgatgaaaacgcctctaaccacttggcgatcggcagtgcgtatgcctttaatattgagggcggcaaacaaatgacacgggaagagcttgtcaaagagggcttaaatgaaagcattacacacgtagattttatggtcggttccaaagatatgaatatcgacggcattacagcggacggcaaaagagaaccgatcttcagaaacggaaactgggcattttaataaaaacaggaggcgatcaggcctcctttttatttcgcttcatacatttgcaagttggcgcagacggtttccaaaacaggtgtatcaactgacaagcctttcgctttctcaagcaaaaatccgtgtaaatgatcaccttccgtcaccctgcccttttccatatctctcagcatcgacgatttcatatggtaagacatgcttgtcaatgtgcgataactttcttcttccagaccaggatctttcgggatgccggcagccttgaaaatggctccgatttcagcaaagaggcgctttgccgttttgcggccgccttctgtttctaaaatcggtccgaccggctgttgaaacagagtggtcactcccgcctgcgcggcaataaacatatattttttccaaatgtccttttcaatatcccggctgatgatgacatctgctttcacacctgcaaatgcgttttccagctcattcatacgttccgtgcgttccccgttccattcaccgaaaacaaagcggtgggcagcgctcgtatgaagaatgtcccctttgtcgttaagggcgctctcaataaagcagaggccgcccagcacctgccgttttgaaaaagcttcaaacagctggttatagtgcctgtatccgtttaaaaaaggaataatgaccgacgaaggtttgacaaacggtttgacatcccgaatgacgtcctgcaaagaatacgcttttgaagcgatgataaccgcgtcaaatgctccttcttcgcccgccatcattaatttcggcttgattgaaacatcaccttttgcacttttgacggtcaaacccgtttcttgtaattgttccgcccgtttcttgcggacgagaaacgtaacgtcatttcccttttctgcaagacgcgcgccgatatatccgcccactcctccagctccgacaattaaaaacttcatgatgcattcctccgtctcttttcaagttatgtattcatttattgtaacgggaagtcagaagattgaaaacttttttcataaataaaaaagcagagtctcccctgcttctttattacgcgtatagctcttcaagctttttctgcacatccgcgttttcaagaaattcgtcataagacatttgtttgtcaacaatgcctttaggcgttaattcaataatgcggttggcaattgtctgtacaaactgatggtcatgagatgaaaacagcatagcgcctttaaagctgattaagccgttgttaagcgccgtaatggattccaaatctaagtggttggtcggttcatccagaattaagatattcgcgccggaaagcatcgcttttgaaagcatgcagcgcactttttctcctccggaaaggacgtttgattttttgttgacttcttctcctgagaacagcatgcgccctaagaaaccgcgaagaaagctttcactttggtcatgcggcgagtattggcggagccagtcaacaaggttcgcatcgctgccgtcaaagtattcgctgttgtctttagggaagtacgcctgagaagtggtcacgccccatttaaatgtgccgctgtctgcttccatttccccggaaatgattttaaacaatgtcgtaacggcaagttcgttgcggcccgtaaatgcgattttatcttctctgttcataataaagctgacgttatcaagcaccttaaccccgtcaatcgtttttgttaagccttcaacccgcagcacgtcatttccgatctcacgttccggcgtgaaattgacataaggataacggcgtgatgacggtttgatatcatcaagcgtgattttatcaaggagtttctttcttgatgtcgcctgctttgatttagaggcgttggcgctgaatctggccacgaactcctgaagctgtttaatctgctcttcttttttcttgttggcttcctgagaaagctttaaagcaagctggctggattcataccagaaatcatagttgccgacgtacacttgaattttattaaaatcaagatcggcgatgtgcgtgcacactttatttaaaaagtgacggtcatgggatacgacgatgactgtgttctcaaagttgattaaaaactcttccagccactgaatcgctttcagatccaagtggttggtcggttcatcaagcagcagaacgtccggcttgccgaacagcgcctgtgccaaaagcactttcaccttttctgaaccgcctaagtccgccattttcttcgtatgcaggtcttcagagatgcccagaccctttaacaaaatagcggcttcactttcagcttcccatccgtttaattccgcaaactctccttcaagctcagcggcgcggatgccgtcttcatctgaaaaatcaggcttcatataaatcgcgtctttttcctgcatgacttcgtataaacgtttatgtcccataatgacgactttcagcacttcgaactcttcatattcaaagtggttctgcttcagaatggcaagacgttcccccgggctcatatggacatcgccggtctgcggctccagctcaccggataaaattttcaaaaatgttgattttccggcaccgtttgcgcctattaatccgtagcagttgcccggcgtaaatttaatattgacatcttcaaataacttgcgatccgcaaaacgcaagctcacattatttacagcaatcatttagaatcctccatcgtgtctatcatcattaaaagtataccatgaataaaggggaagagaaatgtttccctgcgaatatacgggtttgaaagatgcaggcgtcaaacccggagcgctgtgatacaatagatatatatacatattcatcacggaggaacaagttgaagcttttaacactcacagaatactgtcttatgattttcttcaccggggtttttctggccgtcacaggctttacggcccgtgacatcggcttgtacgtcggtatcgccctcatttatacgttttcgcatctcttttcaaaacggatgcttgaaaaacgcggcaaagagaagcagcaggtgaatctttttttcagcgttctggccattgtcggatcagtgctggccacggtattgttcatcgccgtcgccgcctcgtttgccaaataaaaaacgcctgctgtccaaatcgggcagcgcggcgtttttattttgtctgacgcatatcatgaaacgggaagaacacaaacttcgaggtgccgacgatccggttttcggcaattaaaccgagtccgttccggctgtccattgagttcagccgattgtcgcccatgacgaagtatttgcctttcggaacctttacggggccgaaatctcccgtcaggttgactcccagttttttcgcttcttttttattgctcgcgaggtacggttctgcgatttttttgccgtttatataaagcgtgtcatttttcatttccaccgtttctcccggttttccgatgagccgctttacataatggactttcgacgtatcgccgttaataatgacgatgtccccccgctcgatttctccgatataattgacgcttttgttgacaaacagcctttcaccgtcatgtaatgtcgggtacattgatgatccttccactaagtacggttcaaacaggaaatggcggattaaaagcgcaagagcgaccgctataatgatggcctttccccattcccaatacgtgttggattttctttttaccgatttttcagaagtaggtttttgttcttcagtcaacgtggttcctcctagacgatcactgttacggtttcatgtactatctttactttatcacaactcatcaccaaatacataacgcttctatgcgcacatgattgaaaaaagcgcccgtaaaggacgctttttgcttatttctctacaaccggttttttgacgattcccaagataaccgccgttacaaccgctccgatcacgatgctcattaagtaaagcagcggatggttcgtaatgaatgcaacgaatattcctccgtgcggtgcaggaagcgttacccggaaaaactctgtcaacccgcccgctaccgcagaaccgacaacggctgcagggatgacgcgaagcggatcagccgctgcaaacgggatggcgccttctgtaacgaaagctgctcccatgaagtagcacgtaataccggcttcacggtcacgtttagagaatttatgtttaaagaatgttgtcgccagtgcgattccaagcggcggagccattccgcccgccatgatggccgcatgcggcgcatagtttccggccccgatcatcgcgataccgaaagtgaacgccgctttattgagcgggccgcccatgtcgatagccatcataccgcctaaaataatacccattaagacaaggtttccagttccaaggctttcaagccaatttgttaagaaattcataaacgctgcgacaggtgtgtttatgacaaactgcatcaggacaccggtgataaaaataccgagcagcggataaatcagtacaggttttaatccgtcaagagtctgaggaataaagacaaacagctttttcagcaggactacgacataaccggctaagaatccggcaatcagtccgcccaagaatccggcattcgcctgcgtagccataaatccgccgaccatacccggcgcaaatcccggacggtccgcaatactcattgcgataaatccggcaagaactgcaacaatcagctttaacgcattatcgccgccgataaagttcagcgctgcggcaaacgtgttgtatgttgggtctttcggatcagctgaatgaattccccagaagaatgaaatcgcaacgagaattccgccgccgacgacaaatggcagcatgttgctgacaccgctcattaagtgtttatagaaagtacttccgatgcttgtgcctgatttctgtttcgagccgtcttcatctgaagcggaagatcctccgccgctgccctcgtaaatcggcgcatcttggttaacggctttttcaatcagttcctgaggacgtctgataccggccgtcacaggcacttgaagaacatgtttgcctttaaagcgctccatttcaacctgtttatcagccgccacgatgatcgcaggcgcgtcttcaatttcttgagccgtcagcttatgtttgattccgcttgagccgtttgtctctactttaatgtcaacgccgagctctttcgccttttccttcagtgcgtcagctgccatgaacgtatgggcgatacctgtcggacatgccgtaacggcaaggattttgccttttcctgacggcgctgcctgttcttcctgctcttcttcttcctcatcgtcatctttgtcatgctgattgatgatgtcaatgatcgcatcttctgattcagcttcaagaagctgtttgcggatttcctcacgcataagaagcgttgaaagtcttgataatgcttcaaggtgcgtattgtttgctccttcggttgccgcaatcataaagaccaggtgtgccggctgaccgtctaatgattcataatccacaccatcttttgaacgtccgaatgcgatggccgggttaatgacgctcgccgtcttcgcatgaggaatggcaatgccttcgccgattcccgttgagctttggctttcacgatttaaaatggctgctttgtaagcctctctgtcatttaatctgccggctttgtcaagcactgtcaccatttcatcgataacgttttctttctctttgctttctatattgagatgaattgtatctcttgttaacagctcagttatcttcacttttctttcctcctctatagacgtgtgactttaacttcaggaagaagctgctgtacaaactcttcagttccgagttcttcagaaaatgccgtcgcgcttccggaagcaactcctaaacggaacgcatcttccaaaggcagctgttttgaaattcccgcaaggaatcccgcgacgacggaatcacccgcgcctaccgaattgacaagctttcctttaggaacattggcgaggaaaaccgcctctttcgtaaataaaagcgcaccgtcgccagccatcgaaacaatcgcgtgttcagcgccttgttcaatcaattttttaccgtaaggaacggcagcttcggctgaatcaatgaccgtattgaacatttccccaagctcatgatgattcggcttcatcaaaaacggtttcatttctgtcgctttcatcagcgcttcaccggagatgtccacgactacccgggcattctgctttctgcatgcctcagcaattttttcatacgtgttatgcggcagggaagaaggaatgcttcccgctaaaacgacgatgtctccctcttccagagcggagaactgttctaaaaaggtattgaacactttgtctgaaatcgtcgggccctgtccgttaatttccgtttcatcgcccgttttcagttttacatttatacgcgtgtcttcatctacctcagaaaaagccgtttccagaccttcctgctgcaaaaatgacgtgatataatttccggtaaatccgccgacaaaccccaatgcttttgacggcacatggtgtcttttcagtaatcttgaaacgttgatgccttttccgccgggatacttcgtgtcatagctggaacggtttaaaccgcctacggcaaaatcttcaacgtgaacgatatagtcaacagacggattgagggttacagtgtaaatcatggtttcactacctttacgacagttttttcttggtaattatcgaatgcaagttcttcagcttcagtggtaatgatagctgcatcgcccaaggcggcgaacgctgcgaaagaaatctcgccgaatttagaaggatcggctaaaacatacgcgtttttcgcctgtctcacagcctttgtcttcagaagagcctcatccggatcgggtgttgtaaaaccggcttcaatgtgcacgccgttcaccccgaggaagcttttgtcaaaacggtactggctgaccgccgttaatgaggcgccgccgatcatcgcacctgttctatgcttcacatatcctccgagaagataaaaaggaatccctttccttattaaagcgtcgatatgcataactccgtttgtgacaaccacaatgtcctttgtatgatctataaaatcaatcatatgcaatgtagttgttcccgcatcaagataaatacagtcaccttcttctaataaagatgccgcttcttctgcgatcttcagtttatcttgaaggtttttggaggatttttcaagcatatcgggttcttgcctgctgttggaaagtttagacgccccgccgtgaacgcgctttaaaaatccgcgctcttcgagtgttgataaatctcttctgatcgttgattcagaagcatttgtcatgcttatcagctcttgaatcttcaccacatcacgcttttcaatctgatcaataatcagctgatacctttcaggagtgagcatattccgcctcctttggaaacgtattcatttcggctgcaagataattgtaaacgctttttttacttctagcaactaaaatcactcaaattcattcaataactatcaaaatctttcacatttgttcatattaacgtatgtacatagggtttgtaaactgtaaattcgacaaaaagggggacaattgtatgacattttctttttatcataaatgaaaaaagtctattatattcattcaatcattaaaacacaaaaaaaccccatgcagactgcatggggtacgggttattcataccgtaacgcttcaatcggatctaagcgtgatgctttgttggcgggcagcatgccgaaaatgacaccgatcagcatactgaacagtacgccgatacaaaccacctgccaagaaacgagcgacggccagcctgcgataagggaaacgagtgatgctcccccgtagccgagaccgattccgattaagccgccgattaatgtaagcacaacagattcaattaagaattgtgtcagaatctgtcctctcgtggcaccgagcgatttgcggatgccgatttctcttgtccgttccgtcactgatacgagcataatattcatgaccccgatcccgccgacaatgagagaaataccggcgatcgaaccgatgatcgtcgtcatgacggtcgtgacctgaccgattcccgccgcgatttcttccatattcataacttgataggcctcttttgtaccgtgattgtcatttaagagacgagccgcttcttttcctgttgatttgatttgatcagcggactccgtctgaacggaaacgttgctgtagtcgttagtaccgaaagacgttttcagcatgttgaacggcacatacatttcactgagtcctaacgataaaaaaccgctctcttctttcagtacgccgattacttcaacgggctgtccgccggcccagacgatttttccgagcggagacgttttcccgaacagcttttcagccatttttttcgagatgattcccgctcttttcccggaaagaaaatcattgtccgtaaatgtccgtccatcttgaacgtccagcttttttacgtccatgtagccgctgttaatgccgttcagcgtaatatccgtgtcttcttcatggtaacgggccgtcatggattttacagcggaagcgacaacctgctttacgccgtccactccttttaatccattaatatcttcttctgtaaaactcgcttcctgtaaggcgttcggattggctgttaattcttcatcactgggcatgtaaaacaattcaatcgtattgcccggcccgctgatggattgcttcagcatttgctctccgccctggccgacagccacaacaacgattactgaaccgacgccgataatgattccgagcattgtcagaatcgatctcagcttgtgagctcttacggaactgagggccatccggagattttctgacaggctcattcccccactctcctctgctcagcatcgcgggaaacgatcatgccgtcacggacgaaaatcactctgtttgtacagtccgccacttcaggctcatgagtcacaagcaccacggtcacgccctctgcattaagctctgtgaactgctccataatggaaatgcttgttttcgtatccagtgcgccggtcggttcatcagctaaaatgagcttcggttcgttcacgatggctcttgcaatcgcgacacgctgcttctggccgcctgacagctcattcggcatgtgacgcatccgatccgccaaaccgactttttccagtgcatactcagcccgttcctcacgctcttttttgccgataccggcgtagatcatggggagttcgacattttttcttgcattcaatcgcggcagcagctgaaactgctgaaagacaaatccgattgatttgttccggaccgccgcaagctctttttcagtgcatgaagaaacatcttcgcccgcaagcctgtaactgccggacgtcggtctgtccagacagccgatgatattcatgatcgtagatttccccgatcccgacggtcccataattgacacatattctccttcttcaatcgtcaagtcgattgaacgaagaacatcaaacgtctccttgccgatctgatagctttttttcacctttgaaagctgaatcatctatgctttcacatccgttccgtcagtcaaatcgtcagccggattcagaatgactttatcatcctttgaaagcccctcttttatctccgtaagctgatttgcggtatcgccgactttaactttcacgcgtttggccttcccgtcttttacagtaaagacccagtgctcatctccgtcttttttgactgcggaggacggcagtgtatcggctttccgtttgtcggtttcaatgttcataattaatttaaaccccggcttgccctccggaaggtttccgatcagcttaacctggaacggatactgcacggcctgttccgtactttccccggaagcagcgcttgacttttgatcaggaacgaggccgacagccgccactctccctttccacgttttacctggaatagcgtctgaggtaattgtaacgctttgtccctttttcactttcagcgtgtcgtattcggacaaattgccggcaacgatcaggtgttccgggtctcctatatgtataaccggttcttgaatatccgattttttagaagccgcttcttgatttaccgagataaccgtcccgtccatctcactcttaacattgagattcgccacttgattttcaagagactgcttttgcaaatcagattgctttaattcgatttcagccgttttttgctgaagctgcagatcagtccgttcggattcaatttgttttttggcttccgcttctcccacttgttttgccagatcttgttccttgctgtttaatgctctgagtttttcttcaacttgttcgatttgcatacgttttgattgttctgtcaactcattttgttctttatcaagattgagctgctcatttgtatacgtgactaacgacgaccctttttttactttgtcgccttcttttactttcactttatcaagagttcctttatccgcttcataaaaaacatactgttctttagagaatttaagtgttcccggaaccataaccgtagaggagatttctctgttttccatggttccggtttcgatttttttcccggcgctgccgcccgcgggagcggcagacttataaatattgataccgacgaatactgcaacaattacggcgatgccgattccgatccaaatttttttcatgttatacacctgctgtcactgaacttaacagtcctccgactgccgaaaccaaaagcataataacaaacaggacaatcgcggaagtccaggccgctttttttgaaatgccgcctgtatagcgaagtcccaaagcgagcagaatatagctccagatgctgaaaatgtcaaacgcgcttaaaaagaccgcgacgccgtctccggccggtatgacactcgccaaagatgtaacggcgtacagtgagcccgcaccggtaaaataagtaacaagaccgttaatagctaagccgatattggtaataaatgccgtaaacaggctgagtgagagcatttttttgtaagttgtcacgccgcctgaaattttgacgcacagccagtaaatgagcggaacgataaacagagcgataatgcccccgaagattcctccgaacatcgagccgaatttagcaatggttttggtcatttcaatctgatcatccgacaatccgtcaagagatgagctgttcagcacttcttcataattcatccccaatccgcgcaaaatactgccggccgcgatgagaatgatgacaatcaggagaggaatgccgatgaccggcttctcttttaatcttttaaactgcacaacaggacttgtaatgacgccgaaaattgacggcttttccgttactgccgtattgcttttttccaggtttggttccatattgctgatgcctcctatgtattattctgtttatacgtacgctttaggctgagagaagtttcaatttttttgccgtttgcgtatttatgctaaattgtaacacaaattctcagctttacgttccataattatgtaaaaaaaagtattgtcagaccggtatgacgggaggctcaaagccttgtgaaggcactgtcttcagcctattcatctaatcaaaaccgcctcaatcaaaaattcctttaaatcccatttggatattctctggaattcagcgcctatatacaaaaaagccggatggcaatgatgcacatccggctcttttttcaccctccgcttacaggagggataaaggcaatggtatcaccttctgttacgatgctgttgtcttttacatatgtttcattgattgcgatcatggcattgtcaatcgtctgaaggccgtaccgttcctttagcagcgtttttacagcagacgccgccgtctctttttcgtcaagttcaatgaccggtgttcccgcctgctccgcaagcccggcaaacaataatactttaatcatcgcgattcccctttatccaaatccggttttccgttcggatagggcgttgtttccagctgatcgcctatccattcttcgccgtcttcccagatttcttttttccatatcggcacaatctgttttatccgttcaattgcatattcattcgcctcatatgccgcctttctgtgcggtgaagacacggcgattacgaccgctgcttctccgatatcaaggacgccgacacggtgagtgattgcagcttcggctccttcccatttcgcgctgatttcatcgccgatttgagaaagcatttgaacagccatcggttcatacgcttcatattcgagccgtaccgtccgccgcccggcagtccactctctgaccgtgccgataaacgttgtgatggcgccggcttcacgcttttcaactttttttacgatattttccgcaatgataggttcccttgtaatttgaaaacgttccatttaagcagattcccctttcagctgcgaaagcacaaacatcatggcagccggatcgtccgcatggaatacgggcatgcctgcatctgccggcatatgctccgtatttctgctgacaactgcgatcacgcgctccaaatgcttcagcttttgccaatcttcgctgtctttgatcataatgattttcggatgcggcgcatgtttaaatccctctatgagaagaccgtcaattcccagacattcatacagactgatcaagcccgccaaatcccatttttttcgcgccgtaagctgcaggacgccgtccccttctactgccgtaaccgcggctccggcctttgaaaaacgctccgagtcttttccgtcagaaaaaggctccggttctcctccatgtccgtgatgttttaaacatccaatatcgcactctttcggcgcagctttcagcacacgttcaataaacgttgttttaccgctgttttgaaaacctacgatctggacgatcgggaaagaattgaccacggccattcacttccattctcatcacggatgaggagcgcgtgaaccgtccggcccgcttcataccccctcgttcctcccggcagaaggataaacgcgtttgcttcggcaagagatgtgactgagcttgatttgtcgagaccgaccggtgacgccatcatctttccgtccttatgataaacaaatgccctcacaaatctcgtaaacggattcggtttcggaaagtcgtttgttaacacggcttccgtccatccggaatgaggtttttcattcagaagccacgtctgaatcatcggtttgacaaacagggtgaatccgacataacatgcggacggattgcctgaaaggccgaacagcagcatgtcatcggcccgggcgacagttgtcacgctccccgggcgcattgccactttgttaaaaagaacttccgctccgagcttattataaatgtctggaagaaaatcaaaatcgccgactgacacgccgccggtcgtgatcagaaaatcaacttttttcatagcttccttcaccgcatcatagctgtcatcaaaatcatcggaaattttccctaagttcagcggtaccgcgcccgcttcaatgacctgggcatacaccatagcagcgttgctgttgcggattttccccggctcaagcggatcgctgacatgaagaagctcggttcccgttgcgataatgccgacaaccggctttctgaccactggaacagaagcatagccgaaggttgctaaaagagcggttacgcccggcgtaattttcgtccctttttttaatagcgggctgccttttttcgcgtcttctccttgatatgaaatattatcacccgcatgaaaagggcgtttcactgacatgtaattcgtcccgttttcagaaaacgtttttgtcagctcaagcatcactacggcatccgcaccttttggaatctgcgcccccgtcataatgcggaccgcttcataaggcccgagttctttttctgacacggcgccggccccgatatggtcaattacttcaaaggtgactgcattgtcacgggaagccgtttttgaatcactcgccctgatggcaaacccgtcatatggggaacggttaaaggccggcacatcatgatccgccttaacatcctccgccaaatagcggtggagactgtcctcaagcgccacccattcggtatccccctgttttttataccggctcacccggcggactgcttcgtccacctgaatcggcgttcttttttcaagcatagcaatatctccccttcctacagtccgatcaccctggccagaactgaatttgcttcttttatatcgtttgtaccgtgaatcagagcccgtccgtcctgaaaaataacgattctgaagcgctcatacgccatgtgcagcagaaattcatttgcttccactttaccgatctgcttcagacgtttgacaagctcttctttatccagcctctttaaggcttccgatctgatttgaacggtgtctcttccgcacagcacgcttgctttcggcctgttttcaggctgcagatacggatatacgggctccgcgccgcaggaagggcaatgattccgtttgatctgatccacatttatgctcatattggtgttattccacacgtcaaacgtgaaaaagcgccgatttaccgccgcatgatttcctgtcagcaatttcagcgcctcagcctgctgataagcggagacgatatgaaccgccggaggtatgatgcccgctgtatcacatgtcgctccgcccacgggcatttgctcaaacaggcaggataaacacggcgtaacccccggaataatcgtcatgcacattccctgactgctgacacaggcaccgtaaatccaaggtgttttcgttttcagcgccagatcattgatgaccattctcgtttcaaaattatctgtcgcatccacgatgcaatccgcttgttcgatcagcggttcgagcgtttccgccgtaccttccgccgcgtaagcatcgatatgtatatcactgtttaccgccaaaagacgcgccttggccgccattgctttcggcaggcgctgtctcgcgtcttcttctgtatacagctgctgtctttgtaaattgctccattccacataatcccggtcaataatcgccatacggcccgctccggctcttgccaaaccctctgctgctgctgttccgagggctccggctccgacaatcaggacactgctgtcagccagcgcctgctgccctttttcccctatcggcttaaatcttgtctgccgcgaatagcgctcttccatctgtgttgtccccttgcatttttatttccatcataccatgtttcttcccgatcagtcttgatttgaagactcgacatgcgccaaaagtctggtgtaatcgtcctgtgtgttgatattagcgaactcctccggcccggcgccgatgtcttcagcctgcacataacagacagacagctgtttcagcgtgtctgtcattttcagtttgttttgtgtcagctgatcaaaaagcacatcctgcacccgcttatggtaaaccgccaagaggggctgctctctgttttcacaaaccggtatgacagcgtccaggtttccggtcagcttcatttcaagcgccgccatcgtttttcttgttacgagcggcgtgtcacaggatatgaccgtatatatttcgccttccgtttgtttcattgccgtatagatgccggcaagcgggcccattccccgaaaccgcggctcatcggccaaaacatgccgctccctgtttgataagaacttttttatatgttcagggcggctgataattaccgtttctccgccgccgaaggcttttttcacctgttcataaaacatgccgcccttccactttgcaaaagctttcggttctccgaatcttcgggaagctccccccgctaatattacattcacccgtttcatgtcatctctctcccattctatataaaagcatagcaaacgcctcagccgaaatacaatattacggtgcttgtctgtttaattaagaggaatagccgttgatcctttcccatattgtagtgttaacatcatgagggagatggttcttatgaaaatatccggtccgtttttccacgacacttctcaagagaacctttacttgaaatccgaactttccagatgcagaaaattaatttcagaatttgaaacaagctacttccatcaaaaaaataataagcttcaggaggaaaacgccaatattaaagagcggcttcacaagctttctgacgaattgaaagccatggttcaaaaacacaaacagacaagtgacacggaacgttctttgcatgaaatcagagccgggctgctcgataaaatcgtcattctgcaagaactgcttcagcaggaaacgtttcggcggaaaaatgagatggaagaaaagcaccgtctgcatcttacaaatgtaaaatttgaagaagaaaataaaaacttacatacccgcatccgctcacttgagaccgccattcagactgaacggacttctcacgaagatatgaaacagcgttatcatgccgctgcagacgaaaatacccggctccaaacacaaatgatagaaaaagaataccaactcaaacatattaaaatagaaattaatcatatgagagatcgaatactagaaacaaaagaacggcttgtagaaatagaaaaaacgaaagaaaagttatttcaagaaaccattctttcgtataaacggcagctggacgaaagtgatgcttggattgccggccattttgctgatattgacagccgcacggcggaaccggcggaacgagctctggaaatcccttctgtttccaaagagactgttcaggcagaagacttgcttaaagccgttaccgaacaagtcatctccctgcaaaaacaatttgtacaatcagagtcccgcgatcagtcgtttgatgaaaaactggatgcgttgaaagaacgtgctgacggcgaaaagcctttccaaaaatatgtcgtcaagcttgaaaaaaagccgggaaaagatgcgtcacttccgcagaataagcgggaaaacgcaaaaaaactgcttgagtaacgcaagcagtttttactgttttattattcagcagccgtatcatttgccgtttctgctgtttcctgagaaatttctccctcaagaatatattggccgcggtatggttttttcacttccggatacattttaattaagctttgcataaatgttgtcatattaggaatttcaaggccgctttccttttcaatttccttttgcagttcggaacttttgatcgctgcattgtggcgtttcaatgttttaatcgctgcttcgcgcagttttgccgcttttgatcccggtctcgccgtccctcttcttcttcttgtagaaccgtctggaatgccggcgggaagagacgtaatagactgcatctgcggctgggaggattgaggctgtgtctgcggcttttgatagcttctcatttcctgtgctgcaagctctgcaagcaccgggagagagtcactttttttctccggacgaaactctttttttgtatcggacaggctgcctgtattgtctaattctctcagttttgcatatattttatcacgttctatttgatattcacgaatgacttttacctctgcttcgttcaattgttctaaacgtaagcgcagcgcttctctttcattaaacatgtgtaaaaccccctgtcaaaaatttaaacgcttttattaagatattagattacaaaagtaattttatcaactattattttatcattttactattttatttactctatgaaaaattgcttattttctgaaaatggtactttatatacaaaaatcccttatcatataggggattctggacaaagttccaatttattcaaccatttcaaaatataacttgaaattacttgtttaatgaaaattagcgtaatatctacaattttcgactataatatgtaaaagattatgatatggataaaacaagcggtacagcgtgtttacggctgtttctcttattttttaagccacacatggcatattggaattttttatccaataggcacaaaaaaaccctgttacctaaacggcaaagggtttgcggaaccgagacaatagtccgacggagattgtcccgattactcagaagcctgctccgattctgaaagtactcggctgacgcgtttttcaagcattttcatcccgcttcctcccgcttgaaaatggcggagctgtccgcttttatcaaaaacgtaataagccggcacatattcattttcaaatgcttcagtcagcgtatgatcgctgtcgacgtaaatcggctgagagatatcgtgttcagccgctgtttccttgattttctcaaggtcaagatcatcttcggaacggggcatgtgaacggccaccacattcagctgatctttatatttatcacgaaattcgttcatctcaggcatcgcttctttacacatgcggcagctggcggaccagaagtgaatcagtgccggttttccgccgaccagctgttccttcgtgacttctctgttaatccatgctttagcgcctgtcaattcaggcatttgctgacgtaatttcatcttattaccctccttatgaaaaaggttttttgccggggctttcagtttcgccgggcaacgttctcctgttttccctccaaaggaaatgatttggctgaatcaccatgttaaaatgagtgtggcgatttcttagttcatatcttcacaaaaatgatgatattgaaaccgggcaatatgaacaaatcttaaatgaaataactgatttctattaaaaggtttattttattttaaaaacgggtatatcacttttagctttttctgcaatagacttgaaaggaagacatcactatgattgatttaaaacactttgattgggccgggcttctcacatctgccgggattttcatcataaagctggctctcattattttagcgtactttattttccggacggcaggaaaaaagctgatcaagcatctgtttcagaaattcgagcaacaaaacaacctctccaaaggccgcgcttatactttgcgaagcctcgcgcttaatgtatatggatacatcctgattttcgtttttatcgtaatgattttagatttatttcactacaatccgagcgctctcattgccggcgccggcgtggtcggtctcgcagtcggcttcggggctcaggggctcgtcagtgacatcgtcaccggattttttatccttttggaaaaacagatcgacgtcggcgattatattacggttgccggctacagcggcattgtcgagcaggtcggtctccgtacgacgcaaatccggagctttgacggcacgcttcactatcttcccaaccggggcattacgaatgtgagcaaccattcccgcggaacgatgcaggcgcttgtcgatattaaagtgccgcttgaaaaaaatcttgatgaaaccattcaaatcctgcaaaccgcgtgtgacaaagcagccgctgagctcccgcagattaaggaagggccggacgtcatcggggttcaggatttaagctcgtcagaaatggtgatcagaatcattgccaaaactgaaaatatggagcaatggcgggttgaacgcgtactgcggagagaaataaaaatcgcgctcgaccgttttaaaaacgccgcatccgccgaatagaaaaaccgaagcgtaagcttcggttttttcttttttaatgaaattttttttccacttcgctgcagatttcgtcggcggtcattccggaagccgtaatgacgggagcctgagttgacgtatcggcaattccttggacattgctgtcaagtccggttacgacacagcagtcacaattcttcgcatcctcaggagtcttcatcatcactacgtcatatcctttttgttttaacgcctgttctacatccgataaagattgttcaattccaatttttttcgtcatattgaacacctccgttatgtagaatgctcaatttttgttagattattcttcttttcggatttaattggcatacttcgaaaaatatccgaccatgacattgaccccggtttccatcgcttcttcatccgggttcagctttgcgtgatgaagcccgtgggatgaatcggcccccagccagaacataaagccgggatattttttcagcatatatccgaaatcttctccggtcatcgcttctttcgccgttctcacgtcagcaagctgatgatcgctgacaaattgcataaattcttcggtcaggccgcttgtattataaacttgatgataaacggacggatatgtgacttttcctttgcatcggaagccgatttcaattcctttgacaagctcttcaacccgctttttcaccatacgcattgattcctcggaaagcgtccggatggttccctccagatgagcatgctctgcgatgatattttgcgccgtgcccccggtaatcgttccgacagtgatcacagcgctgtcaagcggatccgtatttctggatatgactgtctgcagctgcgtgacaagcgtgctcgcggcgacgaccatgtcgtctgctgtatgcggatatgccgcatgcccgcctttcccctcgagatcgatgacgagttcgctcgtattggcaaacagcaatccgcttttggtggagattgtgcctacaggaagctcaggtgctatatggagagcggtaatcaaatccggtgtccattttttcagcacatcgctttcaagcatcggttccgctccgcccggtccttcttcagccggctggaataaaaagagcagatcatgtttgacgggatgatggacaaaatgatcaataatgccgagcgcgatggtcatgtgcatatcgtggccgcatgcgtgcataaaaccggggtgttcagatgcaaacggaagccccgtctgctcttcaatcgacagagcgtctatatccgctctgtaggcgagcattttttccggagccgtgccgttgactttgacaaagatgccggttctccaagtttcgatttcaattctttcctccggatattggttcaatagattcagcaggtactgttgggttttatattcctgaaagccgatctccggaatgcggtgcagatctcttcggatggcaatgagccgctctttttccatatgtattcctccttgagataagaataaggcgtggattttatcatccacgcccattctatcaaaccattccttacagctggcgtaattcctgtttgatttctgttttgccttttgttttttcatcgatatctttgatttttttcgcaggtgttcccgctacaacggtatatggctcgacgtcatttacaacgatggctccggcagcgacaaccgcgcctttaccgattgttacgccttcaagcacaaccgcatttgcgccgatcacaacgtcgtcttccacgacaacaggcttagcgctaggcggctcaataacgcccgctaatacagaacccgctccgatgtggcagtttttgccgacagtcgcgcgtccaccgagaacaacgttcatatcaatcatcgtaccttcgccgatgactgaaccgatattaatagatgcacccatcatgataacggcattgtcgccgatttcgacttggtcgcggataatagcgccgggctcgattctcgctttaacatcttttaaatcaagcatcgggatcgcagagttgcggcggtcattttcaatgacgtaatcctcaattttgtctttgttttcttcgattgcgcttttaatttcagcccactcgccaaaaacgacgccggattggccgttcaggaatgttttagcggaatcgccaaagctgattccttcaagatcgccttttacatacacttttacaggcgttgattttgtactattttgaataaatgaaataatttcatttgcatccatcattttcatatgtattgtcctcctctgattttctacctcattactgtaacaaaggaaggatacaaagacaagaaaaaaaggaacaagcctttattctgccggctggctgcacagcgcggcaaactgtcttccgaattcccggagctcttcttcctcactgccctcagggttgttttcaattttgaccgacggcagcactacccgcccgccgcgggccgtgattactttttccaattcgtcaagcgctccgcaaaaaaactcataggacgtatctccggaaccgaacaaagcaaatgtttttcccgtaaactccaggttttccatatcttcagcaatatcgagcatttcatcaggaagatccccgtctccccacgtatatgtgcctaataaaatatactcgtaatcattaaaaagttcggcatgaatatccatcgcttcatatctgtctacggatgcttgtgcttcgatcagccctttttcaattaaatccgccatcgcctcggtgtttcctgacattgtagcgtaaacaagcaatacattccccatcttcgtctctcctttatgcataaaaactaatgtgcgagccgtaccgcctcatacggtctgacaaacttactttcgtaaaggcccgcgcaaaaaaagttttcttcccggttggccacccgccatccgtgaccgcggatcgtatcaaaccactttaattcaccggcggcgagatcagcttgataaatacgcgaaaatccattttcgtcctgtgacgatgtgacataaataatcccgttatcctcagaaacgtcgagaaatgatttttcccgtacggcgggcccggctgtaatggcaaactcctcttgcgtccgtacgtttcggacggcaatctcgccccgttctccttttgccgcgccctttgctgcaatgagccattcattctgatacatcatcattgaagccgtcatgcgctgcctttcgcggcttatacgccggatgcggtcttccgtcagttcatacgcccaaatgccgccatgattcatatgaatccgggtgcctatataaatcgtctgaccgtgtaaacaaagcgaacggatgacaggcggctcctttaattgtgaaaagggcttagccacatgccaagtgacgccgaaatcatcagataagtagaggcaatatgtgccatgcgcacagacaaacccgtcattccgcccggcaacggcccatacggaggcgctggtcggaaatcgggaggccgtccaagtctttccctgatcggctgatctgaggacggcgcctttttctccagcggcgaatatgtaaggccctatgtaagtcagcacatgaaccctgcttttcactcggaatagtcttttccagccttcttccgcggaaaaatgaaaaataccttcgtctttcactgcgacaaaatatcctgaagtcactgatgccatgacagccgtcgcgcctttatgaaacatggcaccggtctccgtggtgagcggcccatgcaagaaaaccgcggacaaattctttgcagcattcttgatcttcagccgtctcgggcgccagctcgattttcagcgtttccggatataaattggctccggcctgttcaaacgcatcgtaaaacagcgtgaccgcttcgcaaaacttcgggtaggcgtgatcgcctgaaccgaaacaggccgttttcagtccgttgagctggctgtgcagaatatcttcgtaaaaatcttccgcttcgtaaggaagatcaccgtccccccatgtgtacgtgccgacaaaaacataatcatatgcttcgagagaatccgcacctgcttcgtccatgtcgagacagtcaactgctatctgatgcccgctcagtgtttcttttataatgccggcaatatcctctgtattccccgacatgcttgcatatatcattaatgctttctgcatatgatcacctcgtaattgataatgattttcattaacatatataacactttaaatgataatgattttcattgtcaataaaaaataaaaaaagacagcatgattgctgtctttctaaaatgggcgttcctgcttcagcatatctttaatgacagaaacaaaagcctgcacctgttttaattcaaatgccggctcatatccgagcagccatgtgtcacggccgatcggatgatcctttgtatcaagcaggggcattttatttactttatcttcctcttctaaagtgactgacggcagaatggcataaccgatcccgtgcagcgccatctgcttgcacgtttcaatctgatcgacgaggatggtctgtttcggcgaggttttgaatttttgatgccaccaatgctgaatttcctgaaaatatgtactgtcacttttgaattggataaacggccgatcggtatgggctatatcatcaatacaggaaatttccgtatcaaccaaatataaatgatcggtcattaaataatctttccggcctttccattccggatttccccggataatgccgatatgtacctgatcttcatacagacttttcagcatttcgctgctccaccctgtaatgagagagacctttgcattcggataacgctccacatatgtttttaacactttcggaagccagtgctgcccgataatggaggcgacggcaagctttaatgtgccgtgaatctcaccctcaagttcatcaatattttctctgattctttcttgccgatccgtgacgtcatttgcaaattgtatgattttttctcctgccggcgttaccgtaagtcctttttgagatcttagaaagatctttgttccccaggctttttcaatggtctgcaatcgctgggacagagccggctgtgacacgaataaccgttcggcagccttcctcatgtttaattcctcagctaaaactacgagcatatgaagctcttgaagctgcatgtcgtcctccttttcaatgcctttcgtatttcttatctaccattctaataaaataaaggctgccgaggcaagcgccactcatatgtatgcgttttctttttccggcatgcaaaagaacaaataggctgatcgtgcgagcctacttattcaatgacctgatatggctgctcaactgctttaacacgactcttctcgtgaaaatgccttcaaagacgccttcatcattttcaacgcagacaaagccgttattaatgaccatgctgaaccctttgataatcggatcattgatgtggagacggggaatgtctttcagcatgacttcctcaaccgtaatttgatccagcttctcaaactcgatccgttcaagtccgaaaatgctgttcataatcatatttgtcccgatcaaaccgtgcagacggtacgaagcgtcaaggacgggaatggcggtatagccggttttcgtcagcactaatagagcatgctcaaggttgtttccgacttgaacgtgcgccactttatccgcctcgatcataaattgtccgactgttgcatcaagaagctgatctgattgtaagctaatcatgtcacttcgacccctttacatttttcatcaaagcatgtattccctatattgcaataatataaacattatcattttttgtcgaaaagtttccgtcaataaaaaagatactctttgcaatcgagtatcaatttataggccgctgattaattttcgttccgaaaacggtcatagagcgttacgagttttttataagtggttccatcaacgctttttgaccctgcttctatatcgttgatttcgctggtcaaaagctcaatggcatattcttgattgatcaggatattcagcagaagtttctgttcttcttccgtaaatcgttcactgataagactcatacgtaatcaggccccctatttttaactgaatacctctgaaagcaatgtgaaatttgctttcagctctaccgctagaataagtaaacagaaaaaaatcgtcaaccgcataattcgacattttgcggattctgtatgaaatattattttgtgtaacgattggcataactgaatgctgtgcaggaatcaggcttgattttcgcttcaatgcccatcgaggtaatgcggccggtcatttcttgtatcaattcttttgtcagccctttttgaccgatatccagatgcacttcaaatgaaagatccgccccttcatccgtaaaaggcaagagcaaatctgttagttccataagacggccgtcgaggatatgcgctgccatctcctggctgaacgcggtttccagcgaaattttttcgcgaaggctatgtatcggtcttgcaagatcgtgatttttcaaacagccccaagctcccttgcctgtacggtgcaagtgtatagccgtaataaactttgtgaagtcgcggtaaacttgtgaatcagtccctacagacagcacatatgctgaacgggggtctttattgacaaagcgtttcagccgctccgtcacgtcttgaaaggtcatctgtgcctcagaaagattataaaacagaaaagaatcagccatgtacggacactcctctttccagagtctacaaccaaacgaacaagcacgttcctttgcataatttaataaagctccgcttgcggaagaccggaagcttggtcagcctgaaaaatcaaatcaaattactgaaggagctcaaaaatttcaatagaaatcatgtcaatgttatcaaacggatatgtgttaggtttttcacctttttggaaaaccgtcagttcaaacgtttgatttttttcgaaatatttaacactgcaaattttttcgccgttaacttcaaaataacgctgcatcggctcgttagccgcttccgctgtttcttgcagactttgcagccgcgtgatgatacccattaattgtgacattctaaaaaaagactcctttcaaaaaacaacttcaaatcaacaagtatttattataatacaagttctacagagcatcataccataaagtagaccgggatggcattttcccgctggattttcaaaaagaaataaacgggaaaaccgtgttttcgaatagtttgaagcttttttcggaatgtcatacacctttcaaaaataatttttcgctttttgagccgccattgtcagatgtatgtgaggagaagcccttttatgaggaaacagcataaaaaaacttggcgggggtagcgccaagttttttcggatcttgatctgatagaggggttggggaacagagagtaacttctctctataactaaatgataatgattatcagtatcattgtcaaacgttttttaaaacttttttcaaatgaacaaaaaaagcggcatacagcagccgctttaaagtaatccgtcctgttcatataaataagagtaaggcagatcgataaataaatacatattgtcatccatcgggtatgaaaaggttctgatcatctcacccgtctcaatatcactgtacaggtcactgaaaaagccttttcttgaattccgcatcttcatgatgttttctaaaaagtacggacgccagctccagtttttctccatgtattcaggctgataaagccattcgccggactgcttgaacacatttcccgtcagctgatagccttcttcatcacacatataaattctgaagcagcagtcggtcaggttttccgccagttttttaataaactcatcgtccgcctgatgggttttcttcagctcggaaactgcctgattgacccgcttataaaaattctcagagtgttcatataccgtttccagcttctttttttctctcgtgataaattgctgaaactccgttttcaagcgtgcttttaacaggctccggtctataaaatccccgctcggcgcctgcagataatagccttgaaaaaatcggcctccgtttctccatgcgtactggagctggaaatcagcttctatatcttcatacagcagcgcggcgccgatttttctcgccagcaatgaaatgctgtacagcacatgctcatatgatggtgacggctgagataccttcagcgcctgcaaatctattttcagaaggtccggtgaaaggagcgcgattctgtccaggttgctgctctccttacctatattgtccaccgcgattttaatgccgtatgtacgatagtaggcaagcatatggtacagctgttcaatgtcgccttcgaaattgtgctcggtgatctcaagcacaatacggttcaattcgatgccctgctcttcgtattctttcaaaagctcaagaaagctttcgccgtggtcaagcatcaatacattcgcatcctgattgataaaaatcaacagatcacgatcagcttctttaaaccgctccagcgcctgcctgatgactctgtcatcgacctcaagcttatattcttccggaatgccggaatctaagaaaaacgacccgaggctctcaatctccgcatctgccaaaatacgcccaagcacctcatagcctacgactctttgttcttcagcgttaaaaatcgcttggtaatacggaatgacatcatcaatattcgtcagtatatcaagtgggtccaacatgttatcacctgcttctctatctttgtctgattatacacaattatatcagcaccacaaatgtttagattaggggaaaaggaggcagtatggcagcagcttaaaataaaagggggatatttttaagatcactcttcagaccggttaattaaggacgttattcatttgtttcacaatcacaaataaaaggataaatataagagcattataaccggcagctgtccaaaaataatggctccaatcagtgctgttaaatatccaatcatcctcatgttccaactgaaagaaagttccttttttatctaaagtgccaaatgtaagagttgttaacccgccaacactcttggaaacgtcaactccatacattgaaccggcatgatcagtatgatttattggcatatacgtataatcagataaaattgtttccgccagcttagttggcagagacacatataatacagccgatgtatcgcctccgagcccactcaaatactccctggctttaataaatttcgtttcatcaggaaaatctatgtgatatagcttttcaaatctgattatttcatcagatgtaagattggtattttgataatactccggagtaaaagcgcaaatgataaagtaccaaatattaaagatgataacgaaactgcttacaaatagtacaacgaaccattttaataatttcttcaattaaccgccccttaatctttcaaaattatatcataattttgaatagaaaataaaacaagcgaacggcggctttaacgttcgcttgttttgcaaaataatcaatatatgaaaaattaaaacggataaggattcagccattgccccccgtccattgtgatacagtccccgtttatgtaggacgcttcatcagatagtaaaaacgctgccaacgcggcgatttcttccggtgtgcccagccggccgagcggcacactgttcatagtgcgggacaccgctttttccgattcaaacagcttctccgcaccgcctgtccgttcaatcgggccgggggctatcgcgtttgtgcggatgccgtatttgctcccccattcaacggccagcgttcttgtcagtgacaatacccccgctttggctgcagcggaatgaacgacacccgctcccgctccccatgcgtatgtagcggccatatttaagatgacgcccttctgctcctgctcgatccaatgccttgccgcggcttggctgcagaaaaatgtgccgtttaaaacaatctcaataacagctttccatccattgggcgtcagcttctctgccgggcaaataaagttgccggccgcattgttaatcagcgcatcaagccggccaaagacttttttcgcttctgtaatcatgtctgaagcggcggaatcagaacggacatccatttgaaaacaggcgacctgcccctcaaaggtctcaatttctttttttgtttcctcaagtgcttcatggttcctccctgtcaccatgacgtgccatcctaattcagcctgttttttcgctattgcttttcccataccgcttgaaccgcctgtaatgattaccgctttcttatccataacaaacccaccccttttattgaatgaataatcattcataattttatcacagatgtctttccgcgtcattacatgctgagaagggatttttcagcccggctgatgatataatagaacaactctgacaaaggttggttttacatatggagaaaatgaccagaagaacatttttaaaaagaggattcggcattttgggtgcagctctcgcaatggcttgcggaggttacggctatgcccggtatattgaaccgcgcatgattgaggtcacccggcatacaatcaccaaccgcctgatcccccgcggctttgacaattttaaaatcgttcaattcagcgatacgcatcttagtgatgtgtttacatccggtgacttgaataaagcagcggaaaagatcaatcagctgaaacccgatctgctcatctttacgggagatttaattgataagccgcatttatttaatgatcaccagcgtgcactcgccgtgctgaaaaatcttgaagctcccttcggcaaactttgtgtttacggaaaccatgaccacggaggctacggtacgaacacgtacaaggctctgatgaaagcggctgattttcaagtgtttcgaaacggctatcgtcaggtgcagctgacagacggaagccggattgaactcgcgtttttggatgatgtaatgcttggaaaacccgattatgaagccaccctgtctcgcctttccgaagatgcgttttccattttaatcgtccacgagcctgatgccgctctcaagataggcggatatcccgtaaacctccagctgtcgggacatactcacggcggccaggtccagctcccgtttttcggccctctcattacgcctccttacggaaaaacgtataccgacggcatgtatacgttgcatgacacagccgtttacgtcaatcgcgggctcggtacgacaagactgccgtatcgatttttagccagaccggaaatcacgctgttcacattgaaaaccgagcaaaaataagacttttatcctgatgcacagacaccccctccgtaatatgtatatggaaaagagcaaaaaggagggtgatgaaactgctgacatatcaagtgaaacaaggagaaaccatctcaagcattgcgcaagacttcagaataagcactgctgctctccttcaggcaaatccctcaatccaatcggccatatacgcgggacagcatattatcataccgaatcttcccgatccatccaccattccctactccatcatcgtgtatatcggagcgaagaaactggagttataccgccttggcaggctcatccgtacgtaccccatcgcagtcggaaaaatattgacgaccacgccgaccggagaattttacatcgtgaaccgccagcctaagcccggcggcccgttcggcgcttattggctcagcctctctaaaattcattacggcattcacggaacaaataatccttcctccatcggcaaagcggtatcaaaaggatgcatccggatgtataatcaggacgtcactgaacttgccgctaccgttcctaatggaacaagggtgactattataagatagaaagatcttatttgttaatggaacgagctgatgataatatattacagtgggacctttagggtaaggagcgtgtttatggatatatttaaaaatcgcaattttgtccgtctctttttcgcagcactcgcttctcaaatgggaacgactgtaggtaatatggcttttgctttttacttgctggaccatttttcaaaccagccggcatacacgactttggctgagctgatgtattcactgccgacagttttcgtatttctgattgtcggtgtcgcagctgaccggcttgacaggaaaaaggtcgcagagaattgtgactggatcagagccggactgacgatcgtattgtttgccgcattatacaccgggagcatccctctcgtgttctgtattttgttcatcagaagcgccgtgaccaagttctttttcccggcggaagccagccttgtacaagctattctgcctaaggagcattacgcgaaagcggcgggacttaaccagatcctgttcagcatcttcatggtattcggcgtcggtataggcgcgtttatgtataaaacgatcggtattcacggagccattatccttgattttgtcagctttattgtatcaggctttctgatccgcgcctgccgcattccgaaagaagcccgtcagccgaatggcccttttaaatggggagattcgtttctgaaagactcggtcgctgattttaaggaagggatcgtatatattgttaaaaacaaattgcttgcttcccttattttcggcttttttatctttggttttgtcaacggcggctttgccgtactgccgatgtttacgatgaaatacggacttgcgcctgatcattacgaatcacatacttccatcttcaccgtcgcactcggcttcggcctgcttgcaggaagtgtaatcggaacgatgatcgcaaaaaaagtcaaaccgcatcatttgatgtcgattcctattttggcagccggactgctcatttttgtcctcggctatacggataagctgtggatttattatgcggcggctttcgtcctcggcatgtgcatcggtcctgtcaatatcgccatcggcggctggatgccgaaaatcgttcatccgaaaataatgggccgggtcagcggctggcaggatccttttatgatgtttgcccaatcgattacactcggactggtcgccctgttatttccgaaattcgttaccaatattgattacctttattacggcatgggaatcgtgattttagcggtatttgtgttctattttatcgctcttccgaaatacagcgccgaggcagcagaggtcgatgtgcagcaatcattaaaggctgattccgaaaaacatgcgaatcctgtctaataaaggaaaaagatgcgcccttttcatcagaaaaaggcgtatttttataatcaatatttgcatttcaacgctaaaaaagtataatctatatatgaacttgatcaatgcaaaggagagaaataatggacgaccacgcttattcgaaagagctgcagccaaccatcgagaatctttcaaaagctgtttatactgtgaaccgccatgcaaaaaccgcccccaaccctaaatacctttatctgctgaaaaaacgggcattacaaaagcttgtgaaagaaggcaaagggaaaaaaatagggcttcacttttcaaataatcccaggtttagccaacagcagtcagacgtacttatctctatcggagactactattttcacatgcctccaacaaaagaagacttccagcatcttccgcatttaggtacgttaaatcaatcgtaccgcaatcctaaagcacaaatgtctttgacaaaagcgaaaaatgtattgcaaaaatatgtgggcttaaaggaaaaaccgcttgccgccaacaggcagcagcccgcttatcataaacccgtatttaaaaaacttggtgagagttatttttaattccgccgcaaaaaagccgatgcgtcatgcatcggcttttttctattcaatcacgtacgtatccacttttttaatgagctcgctgatttcaggcttgctgatctgttcatccgctccgactacttcgccccggtggcgcaggtcgtccgtaatcagggacgagaaaatcataatcggcacatcagagctttgcgggttatccttaaggagcttcgtcaaacgatgcccgtccattttcggcatctcaatgtcactgataatcatgtcaatatggtctgacaggttttctccgttatccgtcagttccacgacgtaatcatacgcttcttttccgttttcaaacgtaacgatttcactgtaccccgcctcagtcagctcatccgtcaaaagacgcatcagaagcggcgaatcttcaacgatgatcagttttttacccgcccgtctttcatcaaatccttcctgatggacatgataagtctcaactccggatgccgattcaatatcgtaaatgatcttttcataatcaggcagaaagatcatcgtgtcttccagtttgatgattcccgttaaatgccgctccatgccctggttcagggaagtcggcttttcaatcgcctcccaggacaccctgtggatttgtgaaacggaaccgacgtgaaagacgattttccgtttgttgaattccgttacgatatatttatcgtcttttgctccttcggcatcaacgccgaaaaaggaatacagactgatgacgggaagaatttcgcctctcagcttaatcatcccttctacgtctttatgagactgaggcacagatgtaacatctaccggctgaatgatttcccggactttcatcacatttatgccaaatgtattgacgcctacttcaaatttgacgatttctaattcgtttgtgcctgaatccaataaaatatcgtattgttgtaaagacaattcaatccctcgctatccgcattcagtattgtactgtatatatcggctggaaacggaaaaagtgaatgtattcggtccaactggccatgaactctttataaaaaaatgcttttttctgatatcccattgactttttgacatcgagtggtaaaatagtcaaggatttttcaggaagaagggtgtaataaatgggtacagtagtcatattcgaccaagatcaaatgacagtgttagaagatatcagcaaaacggcttacctgcaaatgaaaaaagaggcgaaagagcgtcccgacaagcccgctccatacatcttatggcgggaagacgtcagctttgaatacgggtattaatgacattcgccacatatcacaatagatagatcatgatacaatgaagacaatcatttcagctggttgtcttatttttttctgaaagaaggtatgttttcacatatcggacatatactcgggatagttcaataaaaagatgacaaatgctcagctagtggtaaaataggataaactcaatatatagtataaggtgatgaattatggaacatttgcttaatccgaatgtaaaagaaattgaaatttcaggaattcgcaaattctcaaatcttgtagctcagcacgacaatgtcatttcgcttacgatcggtcagccggatttcttcacgccgcaccatgtcaaagcggctgccaaaaaggcaatcgacgagaacgcaacggcgtatactccgaacgcgggcggacttgagctgagacaggccgtacagctttatatgaagaaaaaagctgacttgaattatgaagctgaaactgaaatcatcgtcacaaccggggcaagccaagcgattgacgcgtctttgcggacgattttatctccaggcgatgaagttattctccccggaccgatatatccgggctacgaaccgatcatccgcatgtcgggcgccgttccggtccatgtggatacgacgacacacggatttaagctgacggcgcggctcattgaagaatcgctgacaccaaaaacaaaatgcgtcattcttccttatccgtcaaacccgaccggagtgacattgtctgaggaagagctgcaaaacatcgcagccgtcatgaagggcagaaatgtttttgtcctgtctgatgagatttacagcgaattaacctatgacagaccgcattattcgatcgcgtcttatttgagagaccagacgatcgtcatcaacggcctgtcaaaatcacacagcatgacgggctggagaatcggtttcattttcgcaccgaaagaaattgccaagcacatcttaaaagttcaccaatacagtgtgacatgcgcgtcttcaatctctcagaaagcggctcttgaagcggtgacaaacggtgttgatgatgcgcttattatgagagaacagtataaaaagcggcttgactatgtatatgaccgtctagtttcaatggggcttgacgtcgtaaagccgtcaggcgcattttatatcttcccttccattaagtcattcggaatgtcatcgtttgattttagtatggctcttttagaggatgcaggtgtggctcttgtgcccggcagctcgttttcaaagttgggtgaagggtatgtgaggctgtcattcgcatattcactggatacattgagagaaggcttggaccggctggaagcatttattttaaaaacgagagaatccatgcagactatttaaacaacggcataacgccgttgttttttattgtttcgggaatgtaatatgaaaggccgtgcctctatccggtttgctgtctacttggatggctccctgatggtttttaataaggttgaatgtgaccatcagccccaggccggttcctttttctttcgttgtcaaaaacggttcgcctattcgtttcagcacgttttccggtatcccgtcaccctcgtctttcaccgtcacattaacggaatactcatcttctgtcataagaatgtgaaccgttcccccatccggcatcgactcaacggcatttttaatcagattgataaacacctgtttcagctgattttgatcaccgttaatatacatgctgtcatgttcataatccgttttgataaaaatccctttaagatttgcctgcgtctctaaaagagcggtcacttcacttataattttctttaagtttacacgctctttcacggcgttttgctgaggtttggcaagcattaaaagctcacttaaaattaattcgattctgctcagttcagaaaacacaatttcaaagtaatgttcgttttcccccatcgtcggcttcatgagctgtaaaaatcctttgatcgccgtcagcggattgcggatttcgtgagcgattcccgccgccagctgccctgcgatagacagcttctccgacttcagcattaattcctccgtctgcttccgctcagaaatatcacgcagaatgacctgcatggccgtttctccgaaaaacgtcgtcggaatgcagaccatttccgtgtagatcagccggtttttaaaggtaaaccacgattgcttaataatttctgactcggtctttcggttgataatattttggatccgctgtttcacgccgtcatgatcacagggatgaagctgatcatagacgtttttcccaattaaatcttcatatgtttcagcctcaaacagcgaaatgcccgactcattcatgaatacccatttatcattgtgaatcacggcgatcgtgtcaattgaattctgaatgaggagctgataacgttctctgcttttttgcagaatcgtttggaattttttccgtgaagaaatatcaatcagaagcagcaattccgcccgctgatttttatatgtcgtcggtgccgcctttacttctaaatgaacgggcgtgccgtcgagccttctccacgtctgttcgatcattccgacttccattcctttttgcatccgcacaattcggtttttcacaatgtcgtgatactcttcttcaataaactcataagagcgcctgccgattacctcgtctttgctttcggctcccagcatggcaagcatcgcgttgttggcgtaggcgattgtgccgttgatgctgacatataaaggattcggcagcatttcgacaagacgctcgaattcgccgtttccagccgcatcttccgactgttgttctgccttttgcttcttttgttcatacatataaggccggcggggcgtcttctcctcaagcaccttgattttgaggatgatttcccgatccgtcccctccatttgcggtgtgacaatttccacacccgcttcaagccatacgatggtatgatcttttttaataagacgaaaggtgcaaggcatcaaatgatgctcattatagaagtaactttcaaccaaaaattgatcttcttcatgcaggaacgttttgagaaatgacccgatcatctcttcctgagaataactgaagtacgatttgcagtttgcagaaatatacataatacgcccgttagacgtcaaaacggcatgaagatcggttttcgattgaaactgtttgacatgctgagtatcctgttccacagaatccctcctttgcattatactcgcactgcaggctggacacggactgatataaaaagaaattccactagattgattcgctaaaaaatgagcattctccttctattcttattgtgaacgtcaattttcctgaatgaaagaaagggcgcacgagatgttcggccgccctttcatttgttattttttattgtatttcttttcaagttctttgtaagcgtcaattgctcctttggcaatgtttttgctgacatgatcgtgatcatcttgaacagtcggtacgacgacgctgaatgccactcgtggatgttctgacggatagtaaccgacaaaggtcaggttataagtgtctttcccccaccagtttttgttcgtgccgtaatagcgcgtctgcgcggttcccgtttttccggaaacatcagcgccggacccctggaatgttgaataagccgttccttgaggtgagcttgtaaccaatttcatccctttatgaacttggtcaaaatcgctcgggctgttatttactttgttcaaaattttactatctcgctgttcaatcgcttttccaatcttgtttttgctgtccggttcatgaatgcttgtgacgatccgcggctggacgcgatacccgccgtttgcgatggctgaaatatattgagccatttgaagcggcgtatacgtatcaaactgtccgatcgcaaagtccagcagcaatcccccgaccatttgcggattcgactgcatgcctgctgattcctggggaagatcaatcccggttttcacacccaggccgaattgagcgtagtagttgcgcatttttttaatatcgtctaatccggccggcagcgtgccgtgcgggacgtaggtaatgcccgcgatattcatggccacatgaaacatatatacgtttgaacttctttgcagcgcggtcagctcagtaatggctcccatttgtgtccacgatttttttttcgtgtcgcctttaaatacaagcggtgcatcgacaaacgttttataatgcgggaggccgctttggtaacctgcgagaacagtcgctcctttaacagaagagcccatctcatattgggtcgtaaatgctccgatcgcaaaatcctgtgttttatttgtttcgagatcgatgcgtttccccgccattgagagaatatccccgttgttcgggtccatcatgacggcaaatcctctgtcaaccatatagttgcctgcggcgcggcttcttctcagctctttttcaatgactttttcgactttcgactgtaattccatatcgagcgagagttgcagatcgtagcctctgctgccttcatcgacgggcttttggctgacgacctcacctttgctgttttccacatactctactttttctttatgcgcgtttaaatagtcctcatactgatattcgatgtagctttttcccacccggtcattcagtgagtagcctcttgtgacatagtaatctttccgttcgcccaacaatccctgttccggtgtcgtcacaccgccgaacagagagtacagcgttttgtcgtatggatattttcgcgtccagtcattgatcacgtcaatgccggggagctctttcaggtgctcggatacgacggaaacttcttcatatgtcaggtcgctttttggtttttgcttgttgttgtcatgctcgtcaagcagtgaaccgctgtttccgtttccgttcagcttattcgggtccattgatttgacgacttgcggctgataggcgttgccgcttgaaaaacgcgtataaatcgccgcgatttccagctcttttttattttgtttgatcgcatcaatctcctgcttcgggacgcgttcaatctggcgtttgtacacttcttgcggcttcaggctgttttctgagtccttcataagcttttccgccttctttggatgtgcggcaagccagtaatcaatgatatttcgatccttcataaattcagtatcaatatgaatcagtgcggcgagattttttgccgttttcaatttgtcctttgccgaggtttttgaggtagaaacgtatacaatttcaggcacagcctggttatcaaccgccactctgttccgcttgtcatacatttttccccgcggtgtcggataataggcggtttttgcatttgccttctccgcatcctggcggtgtttatccccttcgacaatctggacgatgccgagtttaaaaatcagtgccgtaaagagaagaaaaacaatcaaaaaatagagattcattctcagcgctctgtaacgtttcgtttttttctttggttcgcgcgcaacttcagccactttctgttacacctctcaaatcattgaatatatttacataaacagattttaattgtaacatttttgtaaaagttgttacagcgaaaacgggtaaaaaaaactgtcaagatcaaattatcttaaaatatatctaacacttcaaataatttgaagagatgtaacggattttaaaaaataaatacagatcgtttttcccggtatagagccatttttctgcgctcaattacaattatgacaagagtttgttgtcaaaggaaatggctgcctgcattatgacaaaaaagctgtgataagatttttcatgtagaaaaaaacttctctgggaggctattatcttatgaaaaaagcatttctcttatctgccgccgcggcagtcagtttgattacattcggaggcattcagcaggcatctgcaaaagagctgtcatgccagcacgtcgttactgtgaaaaaaggaaacaccgtacagcatctgactcttcaagaggctgttgaaaaactacatatgaaaacgagcgtgaaaaagctgaacgttaaaaatgagaaagaactgactcagctgctgcaaaaacacgcaaagcattctgacatgacagttaaaaatgttcaaaaagaaacaccggcaaaaacggctccgacagctgccgaaaaaccgaaagccgatcaaaaccagacggctgacaatgcaaagcagacagataacacaaacaacagcagcgagaaaactccttcatcagtcagtgcgtacgaaaagaaagtcgttgaattaacaaatgcagagagacaaaagcaaggcttaaaacctctgcagattgatgaaaaattaagcaaatcagctcacgcaaaatcacaagatatgaaagacaaaaactatttcgatcaccaaagccctacttacggctcacctttcgatatgatgaagtctttcggaatcacttataaaactgccggtgaaaatatcgccaaaggacagccgactcctgaagctgtcgttaaagcttggatgaacagtgaaggccacagaaagaacatcatgaatcctgagttcactcaaatcggtgtcggttacgtagaatcaggaaacatctggacacagcaattcatcggaaaataaataataaaaaagattgcccctgcgggcaatcttttttatttcacccaaagcttataaatactttgagttccgctgttttcttcaccttgcgcggaaagcttgtcgtataatgatttggcaagcgccaatccgggcatctcttctcccatgagctccgcttcttctagggcgatgcccatgtctttaataaagtgtttcacgtagaatcccggcgcaaaatcgcctttcagcatacggggggcgagatttgacaatgaccagctgccagccgctccggttgtaatgcttttcagcacttgttccgggttcagaccggatttttcagcataagccatcgcttcagccactccgaccattcccgttgcaatcgcgatctgattgcacattttcgtatgctggccgctgccagccggcccttgatactgaatgttttcccccataacggagaaaagcggcaggcatgcttcaaacgcttctttttctcctccggccataatggcaagcgttccgttcctcgcgccgatgtctccgccggaaacgggtgcatccaaggcgtgaatggacttttctttggctttctccgctatcttcttcgccagagacggttttgatgtcgtcatgtcaatgacaaacgccccttcttttgcgtggcggagaatgccgttttcgccgagatagatttcctcgacatcactcgggtagccgaccatggtaataataatgtcagctttctctgaaaggtctttgaccgtctcctgccagaccgctcccttattcagaatctcttccgctttttgtttcgtccgcgtgtagactaaaacaggatagcccgcttctaaaatgtgcgatgccatactgtttcccatgacgcccaaaccgataaatccgaccgttttgttcactgcgctttcctcccctgatgcgattcatagtatttattctttcatgtctatattaccatattataggctgatagagaccgcattacaaagtgaatttagaaatggcgctgatcagatcttcgctcgcgctctttaacatatcagtcgattgcttcactttttcaagcgtaacgagctgttcatcagtagaagcattcacttcttccgccgctgccgcagattcttgagaaatggcggagatgctttgaatcgcttcttgaattgcggcttgttcttcactcattttttgaatgtcattgtaaatatgatctataccttgaacgagagactgcatttccgtcgtaatcagattgagaacctcacccgtttcatgaatggcgctgttttgttcatcattcattctgcttgcctcaatcatcgcgtgtgacgcttcttttgtctcagattgaatcagacggaccgtttcactgatatggccggaagaaagagctgattgctcagcaagcttgcggacttcttcagcgacgacggcaaagccccggccgctttctcccgctcttgcggcttcaatgctcgcattcagcgccaagaggttcgtctggtctgaaatggcggatattgccgtcacgacttcttctatgtttttcgtttgttcttccaggtcattcagcattgcctctacttttttcgtttctgaattggcttcgtttgacttcatcagcagctgcccgagcgcgtccaatcctttgtagctggcatcctctgaagattttgagagttgttttatgctgcctgcgcgatctgcgattccttttattttgaccgagagattttctgatttttcgttgatcgtctcaacctctgacgcttgctctgtcgctccggcggcgacttcctctatcgcttttgcgatttgtccgctcgtttcatttgtttcttgtgaaatgacggttaattggtcagatgtatcggacacattttccgaagaggtcttgacctgttcgaccatctctttcatattttcaaccatttggttaaagtcttttgttaactcgcctacttcatcttttgatttcgtctgggcgcggacggttaaatctcccgctgagactgaatttgttttggcgatcagctgctgaatcggcccggttatcgtttttgctaggaaataactgagtccgatcgtaatcacaagggcgatcagtgacataaaaatgctcaccgtgttcattttatcggctactcccatcagctgatctttttcaaactgcgttccgactttccaccctgtttcttttaccgtttggtagacgaccatgttcccctgcagctctttgacaccttctttatccgcagtgatgtcttttaacgtctgatcttccgaaatatttttcccctgtttttccggatgcgccagtagagaaccgttttcatccgctaaaaaggcaaatccttcatacgggaccttttgctcgttgaccatgctctgaatggaggacagcttcagatctaagctcgccactccgacgacggttccgctgttttgaatggcttttgacgccgtcacgatcatgtctcccgtcactgcatctttataagggtcagtccagacaaccttatcgggtttttcagccgccatcttataccacgttctatttgtcggatcatagtctttggcaaaatcggcctttggatatgtaaacatttgtttgtttgcggttccgacatacgcaagcgcgacatatttgtcattctgtccgatctgctttaactcatcgttaaaaagcagcgcggtttctttcttcccatctgataaaaaagaccgggacaattcaccgcctgctaatctcaataatacggtctcatcatttttcagctgaagctcaatgttctgaccgagtgaattggtgacattctctgtcgtacgttttgcttcctccgtcatcatcggctttaatgtcaaatatgaagaaaccgttaaaaaaacaaccgttacgataagcatcgccgatacaaacacagcaattttgatgtgcatttttttaaacataaccatcccctcctgagagttatatcggtctttcggccaagaaaatgaataaaccttgaaataaatatcaaacatttccgtcctttggcgcagcaaaaaaaaagagccgtcatgtcgacagctccgccttacgtaaaatattcgattttcgctttcggaaaataggtttcgatataagattcgagtgtttcccttaagtcatgttcttcgtctttttggtatatatacttgccgattccgtagcgtccccatttgtatctgcgcttctcttcatcaagctcaagctttgttttcggatagttcttctcaatcacccgtttggccggttttgtaaaacggtgctggatcagttcaaatgtgatgtcatgccgaacgtcttcatcaagcgccgcgtcaagtttctcaaacagttccttatagccttcctcccagccatcgtgaatataaatcggcgccacgatgaaaccgagcggatagcccgctttagcgactttgacggcggcttctatccgtttgtcgagcggagaagttcccggttcaaagtttttaatgacatagtccgcattgatgctgaatctgaaccttgtctttccgttatgttttgcgtcaagcaaatgatcgacgtggtgaaatttagtcacgaatctgagctgtcccaattcgctttgtccgaaatgttcaatggctctttttaatgtatgtgtcagatgatcaattccgacgatatcagatgtacaagaggcttcaaatcttgtaaattccggcgcccgttctttcatatactcatcagcctgatccagaatctcttccacattgacatatgtccggatgtaaggctttgaccccatcgtcgtctgcaggtagcaatagtggcaatgccccatacagcccgtcgcaaacggaatggcatattcggcggacggctttgaagaatcgaatttcagtgttttccggacgccgattaccaatgttgatttcgcgttccggtattgctgcaagtgatttttccccggaatattccggacttgattatgcgatgtcgtttctctgatctcaagccccatgttttcaaacttattcttcagctcttgtcctaacgggtattcgagcgctctcggttcaatataaacaagctggggcacaaacggcttcagcatagacagacactccctttacatattctcatgttgttactttccgtttaaaagagagtgaatatgcgttgtaaacatttcctttgatcaatgataccggtcttcttcaaaaagctcgctgtaaagcgcttccgcttcctcatatgtcgaaaagaccgcgtcatcttcggccagcggatgataggtttcgtataaaaacagagacagttctccctcatgatacgggtgatggacgatctccgcctctttaatatgggcaacattggcggcatgcggattgcggtaaatcacatagaccgtatcccccgctgcaaatgattttgtcatgataatccctcctgttgaaagttattgttccccccttttttccgaatatgaaaaaaaccagacggcttacaccgtctggctgttgtattacttattgaatgtttctttaacgaatgcgacaacctcttctgtcgtgctcatagacaagattgtttctttgaatgattcagcttcttttttagaaagcttgctgatctgcgttcttgccggaaggatggatgtagcgctcatcgagaactcatctaagcctaagccgagaagaatcggaatcgcaatttcgtctcccgccatttctccgcacatgccgacccatttgccctctttgtgagcggcttcaataacaagggtgatcagacggagaatcgccggattgtatggctgatacagataagctacgcgctcgttcatgcggtcagcagccatcgtgtattggatcaagtcatttgttccgatactgaagaagtcaacttctgcggcaaactgatctgcgataacggctgtagacggaatctctaccatcataccgacttcaatatcgtcagaaaccgctacgccggcttcgacgagtttttctttttcttcgagaagaatcgctttcgcctgtttaaactcgtttactgtcgcaatcatcgggaacatgatttttaagtttccgtatgtacttgcacgaagcagcgcacgaagctgagttctgaagatttcttgctcttcaaggcaaaggcggatggctctgtagcctaagaacgggttcatttctttagggagctgcaggtaaggaagctctttgtcgccgccgatatccaatgtccgaacgacaactgattttccttccatacgctcaagaaccgttttataagcgtcaaactgctcgtcttccgtcggaagctggtcgcgtcccatgtaaaggaattccgtacggtaaagccctacagcttctcctccgttttcaagaacgccttttacatcatccggggtgccgatgtttgcggcaagctctacatgatggccgtcttttgaaacagtcggttcattgacgagcttcgcccactcagctttttgcgccaggtaagcactgtgcttttcttcatatttctttaacgtttcactggaaggatcgatgattacatcaccatcgatgccgtctacgattaccgtaacaccgttttcaattgtccctgtagccgcttttgtgccgacgacagccggaatttcaagcgaacgggccatgatcgcggagtgtgaagtgcgtccgccgatatcagttgtaaaaccttttacaaactggcggtttaattgcgccgtatcagacggtgtcaaatcttcagccacgataacaacctcttctgagatcatgctcgggttcggaatttccacgcccagcaggtgccccgtcacacgttttgttacgtcacggatatccgccgcacgctctttcatgtattcgttatccattgattcaaacatagtaacgaacatggaagctgtttctttcaaagcgaattcagcattgactgaatctgcgctgattttctcctttaccgggttcaacagctcaggatcactcagaactaaaaggtgcgcggagaaaatgtcagctttgtcttgtcccagttcttttaaagcatgctctttaattttttcaagctcttctttagaacgtacaatcgcttcatcaaaacggcttacttcagccgcagcatcagcaatgtttttcttttcaaccgttaagtccggctcttcaagccggtatgctttcgcaatcgcaattccggctgaagcgcctattccttttaattcttgcattactcgccgagtccttcgcttttcattgtttcttctaaagcgttaagagcatcgttttcgtcagcgcctgaagcggaaattgtgatttcagcgcctttagcaatacctagagacataacgcccatgattgacttaaggtttactgttttgccgttatattctaagtttacgtcagcatcgtatttgcttgcagtctgtacaagaactgtcgcaggacgagcgtggattccggaatctgctgttactttaaatgttttttgtgccatgattatcattctcctttaaattaaagctattttactacacaatattatatcatacagccgtacttgtcatctgacaagcacggcgtatttatatgcttattttccgattttcacaatatctttttgttcccgttttacggtaccttcggccgaaagggaaatcgcttcaccctcggcaagatttgtaaagacaatcggtgtcattaatgaaggaacatgaggtttaaccgcttcaagatcaacttcaagcagcttttgccccggttcaacccggtcaccctcagaaacaaaagaagtgaatccttcgcctttcaggctgactgtgtcgattccgaaatgaatcaggatctctcttccgccgtcagactgaaggccgatcgcatgttttgtcgggaaaacattcagcacttttccgcggacaggcgatacgacgattccttcttcaggaagaatcgcaaaaccgtcacccatcatttttcctgagaacacctggtcaggcacatcggtaatcggatggatttcgccggtgatcggagaagcgaacacttcttcaccctgctcgtttcggagcggatctgcgataacctcttcaacctgctggctgacttcttcttgcgcggatactttcggttcaggtcgcggcgtgcgtccggcgataatatcctgcatctgtgtttttaaaccgtcagaacgcgggccgaaaatggcctgaatgttgtttccgacttcaagaacgcctgaggcgccaagctgtttcaaacgagtcttatccactttcttctggtcgttgaccgtaacgcggagtctcgtgatacaagcgtcaaggtgcttaatgttttcctgatcacccattgcctgcaggatttcataaggaaggtcgccggcttcgcctgaggcgcccgcaccttcatccgcagcctcttcttcacggcccggcgttttcagattgaactttctgatcgcaaaccggaaaccgaagtagtaaatgacggctaatcctaagccgaccggaatgacaagccaccaagccgtccggttaggcagaattccgaacaggaagtagtcaatcagaccgcctgagaacgtcataccgatttttacatgcagcagctgcatgaccataaaggaaagtcccgcgaatacgcagtgaatcgcaaacaggataggagccacaaacaagaatgagaattcaagcggctcggtaattcccgttaagaaacttgtcagagcggcagaacccatgattccggctacaagttttttcttttcaggcttcgcttcatgatagattgcaagcgctgccgccggaagaccgaacatcataaacggatatttccccgtcataaatgttcccgccgtcagctgtacgccgtctttgatctgagccatgaaaatccgctgatctccgcggatgatgtctcctgcggcatctttataactgaaaaattcataccagaacggcgagtagaaaatgtgatgaagaccgaacggaatcaatgaccgctcaatcatcccgaaaataaaggccgccaaggttggattcgcttccacaagacccgtggagaaggaattcagaccgtgctggatcggaggccagatcactaacataataagaccgagaattaatgcggaaattgatgtgataatcgggacgaaccgcttacccgcaaagaatccgaggtactgcggaagttcaattttataaaacttgttaaacaataacgcggccagaaccccgacgataataccgccgaacacgcccgtcgccaaagtgggtatccccagcatgttaatataggccggatggttttccgcaaaaaactttgcccgttcaattttgtcagacggaatactgccgtttgccataagcacggcgctcatggatacgttcatgaccaagtatccgataatagccgcgattccggcaacaccgtctccgttggcaagaccgatcgcaacccctactgcaaaaagaagcggcaggttgtcaaatacgatttggccggcgctttccatgacgttcgccacaagctgaacgttatcattgcttaagaaatgcatgacttgaatcatatctttgttctgcatggcattccctaacgcaagcaagatccccgcagccggtaaaatcgcaaccggaagcataagagcacggccgattttctggagaacgccgaataatgctttaaacataaaagatgtacctcctctgttagctagtgtgaccttacagcgaaaattcatgacaacgaattcactggcgcaagtcttcagtttaaccgtttacatttgcccttttacacaacaaaaaaggcatgagtaaaaagggtgtgcaaaataacgggatcgttcttcccgttttttaccctcaatcactcatgcctgatcgaatcagtgacacgtttttaaggtttcaactgaaattatgaaattttattggttaatcggtacaaatgaagcgtgagataaaccgcttccgcctcatgaactggttttttcagtatttgctgcaagatttttatcagtttccaagcagtattgtagcatagcgggtattcatttttcaataataacattaacttttctggttcttttgtctgctcttcccgattaatcctgtctatggtaaatctgatatgccggatcagccgcaaatagtggacgctttctttattcactttcatctggaaagattcctcaatcacctgaacgagccgggacatcagctgtgaatgctgattgacctctgaaaggggccgattactcaaggcggagtggatatgcagagcgataaagccgatctctccttccggaaggcagattcccgtcttttcattaatcatgccgacgacttcacgggcaatttggaattcttccggataaagcgtttcggtttccatgagaaacgggtttttaatgtcaaaaccctgctgcagccgctttaccgcaaaggcgatatggtcagtcagcgcaatatggatgtgctcatttaacggttggcttgtccgcttcttgatatgataaatgacgtcattggagatgtcgacaagtgtctcgtccacataaccgaggagctttttaaattgtttttgttctttttcatcctttaagatgaacatcttgtcataccctttatcttcaatgacatccgcttgtttttttccaaagccgatcccttttccgattaagacgacctcattgtatctatcatgtgttgcgatgagcacattgttatttaataccttttcaactgtaaaggaccccttcatgatcctcagctcctttgtcattcaatacatcatatcgtacaaaacgaacggaaagcgcgtcaattctttttttagacggttgatcgttcaataaggcggtaatcaagaactttccttgccggaggcccgccgctgatccggttctcaagcatgtgaaaagcctgctttcccatttcttttgtttgtatatctattgtagaaatacctaacatcttgctgatatcatgattgtcgatgctcaaaatcgcaagctcttccgggatgcgtgtcccatttgccttggcttcaaggtaaagacctgcggatacttgatcattcgccgcaaacagcgcagtcggtttgtcatcccagctcttccatctatgaaaaagggctttcccgtcaagcagcgtcagcgccttttccacaaccagctcttccctgtaaggctgtccgatcttcttgagcgcctctttgtacgcggcgatgcggacttgactgttttttcccttttttctggccaggctgatcgctattttccggtgtcccttttctatcagataatccagaccgtgccgaaatgcttcccgatgcggattactgatggaggaaagccctgccgcatcagtgtactggcagaggatgagcggttctttcacggtaagcagatgctcatcaggaattgctttggagcagataatcaggccgtccacttggcgctcctgtaattgtgataaagcaaaacgttctttttgctgctgataatctgtctggtataaagaaagatgcacgcctgacgcttcggcagcctcggcaatacctgcaacaaggtctgcaaaatacggaagattcaccgacggaagcacaacgccgatcatatcggaaaaacctttggataaatgcacagcatgaatgttgcgcgtatatccgagcgattgcatcgcttttttcactctttctcttttgtccttacttacataaggatgatcgtttaacactcttgataccgttgtaacggaaaccccggcagcgccggcaatgtctctgatcgtagccatggcgtcccccctttctttttttcccttgatctggaatgcgtttcatacagtaagctagaaacagatacatcctattcgtttgaaaggagaagaacagcgatggggattctttgcttaatcggtttgtgtctggccatagtcggcggcagttaccttgccatgcggcccctgaatgaaaagcatgacatcaaaccatttcagcattttgatgattttttcatttaaaaggtgataaaaaaggacgctgccttccagaaccgtccttttttatcacaaagctttctatttcagaatcgttaattctttcggatactgcgttaatgcttcggcgccgtcttttgtgacgaacacatcgtcttcaatgcgcacgccgccgacatccggcacgtaaatccccggttctatcgtgtagaccatgccttctttgaggagtgtgttgttcgcgctgctcattgatggatattcgtgaaccgaaatcccgagtccgtggccgaggcggtgcgggaaatagtctccgtatccggctttttcaataatgccgcgggcttttaaatcaaggtcgccgattctgacacccggtttgcttaattgaagcgccgcctgttcagctttaagcaccgtttcgtaaatctcttcctgcttcgggctgattgattggtatgcgaatgttctcgtaatgtctgaacagtagccgtcaagaataacgcccagatcaaacagaacgaaatcgccttttttcaaccggtctgcacccggattcccatggggctgacctgatttttctccgaacagcaccatcgttgaaaatgacatgccctgcacaccttttttcttcagctcaaactcaatctgcgcaagtacttccgtttcactcacaccctctttaagcgccgcgacaccgacttcaactccgtaatccgcgagttttgccgcttccctgagaatgctgatttccttctcatctttcacgagacggaattggttgagcgtttcttctgccgaaacaaatgccgcgccccctgaagcttgtttgagctgttctgaacgggaaagagagatcgaatccttttcaaccgcgatggaatcaagccgcacatttcgttttgtgagctcggctttgatcagctcccacggatcttcgtgatcgccgtagccgataataccatgctcccacccggcgctgcgggcttgtccggcttccattcccggacaaacgaaaaacggctcctgttcctgaaacaggaacaatcccattaaccgctcatgcggatccgtgtaaaaatcagttaaataaaatacgttttcctttgtatgtataaatgccgcatcatgtccttcttttttcagccaagatgaaacacgttctaatctgttcattttttgcttttcctccttaccaaagtgactctttattcattctatcagttttccggcgtttatgctgtgaacgaacattaaaaaaacagccgcccgatgtgcggctgtcatgtttattttaataatctcagtccgttcaatatgaccagaatcgtgctcccctcatgcccgatcacaccaaacggcagttccatcacctgcagaaagttagcgcagatcaaaaggcagatgaccgagagcgagaaaacaatattctgcttaataatccggttcattttccttgagagtctgcacattttcacaagcttgtgaagatcatttttcataaggactaagtcagccgtttcaagggccacgtccgttcccccgcccatcgcaataccgacgtcagcggttttcagagcgggcgcgtcattaatgccgtctcccaccatggcgattgtgccgtacgtttctttcagcttcttcacttcttttgccttttggtccggcagacaatcggcaacaaccgtcgtcatgcccgcctcttttgcaatggcagccgcagtttcagactgatcgccggtgagcatggctgtttgaatgcccattgattcaagctcagccatcacggctttggcttcaggtcggatttgatcctttaaggcaaagcagcccgcaatccggtcatcttttttaacaaagaccagtgtaaaacctttatcctttaattcttttcccgatgtctgcaaaaaagcatctgccgcatcttcacctgcaaaccccgcttttccgaccatccatttgacgccttctatttcagcctgaacaccgaatccggacgtctcgtcaatcgatagatgtcctgcgggcgcggcgccccggctttcggcaaattcagctatcgcttttgcaagcgggtggcttgattgcttttccatcgcatacaccgcttgcatgatctcatcttcactcacattttcggcagcttgaaacgccgcgactgccggctgtccctttgttaccgtgccggttttgtcaaaagcgatcatccggacgcttcccagctgctctaaaaacacacttcctttaaccaataatccgttgcgggccccatttgagataagggaaagcgcagcgggcataatagaagcgacaagcgcgcacggggaggcgaccaccataaacaccatcgccctgtaaaaggtttcactccagctccagcctaaagcgaaatgaggaatgaataaaagcaaagccacggctaacagcacgccttttacatagacactttcgaatcgttcaataaatgcctgagccggtgacacgctgttttgggctgattccaccagccggatgatttttctgaataaagactgttcatttgttttcgtcacacggaccgttaaggagccgtttccgtttaccgttcctgtaaacacagaatctccggctgttttttccgccggcatcgcttcacccgtaagcgccgattcatcgaggctcgtcacgccagactcaatgatcccgtctgctgctacgcgttcgcccggcttaatgacgatcatgtcaccgatcttaagttcagcagccggcacccgcttttcctgtccgtccgcaagcagggtcgcttcctccggttccagtttcatcaaagaggttaaatcacggctgcttttattcatcgtatatgtttcgagcgcgccgcttaatgaaaaaataaagataagaacagcgccttcagcccaataaccgatcagggcggagccgaccgccgcaaaaatcatcagcagttccacatttaacgccttcgtctcaatggtatcctcgattccctctttcgcttttgcaaatcccccgatcaggaaggcaagggtatacaaagtgacggacaggccttttgtttcggtaaaaaaccaggccgcaagaataaggacgccggatacgagcgccgcaatgagttctgcatgctggagccacttttttccggcccgctcttcttgtatgtgctgttgtgaatgggtttgtgtcatcacttgttcattcattatgaattctcctctctaattgagaacgcaaatcatcttcaattccccgataaaagcaaaacagccgcctgacaggcagcattttcacagtgttatcgcagtgttttctttattatagcatgccgacggaagatttcaattataattgttttaatttctttttgataataattatcaatagtgtttcttcagctgttcattatatgcaaaaaaggtgcgggaggaattcctcccgcacctttttatttctctgaccattcttttaattgtgaggcggtcatcggaccgacgatctttttttcgatttctcctttttcattcagcagaaatgacgtgggaatcgtcatgacatcgtattccttcataagctcgcctttcgtgtcaagaacaatcgggaatgtgagatgatgctgactgacaaagttttgaacggtatttttgttccgctcggcattcatcaaatttaccgttacaaggcttacatcatcggactgatgctgttcaaaatacgtttggaactgcggcagttcttttttgcacggcggacaccacgatgtccaaaaatgcaaaatcgttttctgccctttattcggaatcgatatctcgtctccttcaatcgtcttcatcagaaacacggcgggaactgcctgtttttctgatgaggcttttgcttcaggcatccagacggcggcagctatcaaaaggactgcacatacaattaggcggtttttatgcatatgatcttcctttcacgcgtttcggatagcttgcccttgcttattgaaatgtatcagccttttcagctttcgatccggggcgctgttcttccgccgcccgtcaaaaacacggagacaccgaggtctttgcagatcgtcgcgtaatgtaaacttgtcagaagaatcatgccggtattcatgccgagtataatgccgagcatttgcaattcaggcatagaaccgagcacatacatcatcgaaagccccacaatgctgctccatacgttatgataaaacgccgttttcacatggccgataccgatcagacaggcctgaagcggcatcacaaacagatgaaaaagaaaaaacggccacaaaagctgcaaataatactgcgcttccggagactgaaaaaacaaatgggtcagcgggcccgcgaactgaaacatgacccagactgccggaatgccgtagccgaatgtaataaaaatcgcttgtctcagccgtttcagcacaatatcatattgggacagcgcatatgcttctgaaatgctgggaatcatgacgaccatcagcgaatgggcgataaatgcgggaaacgaaccgattgtcatcgctacaccggcaagcatgccgtattgatcaatcgcggctgtcccggctgccccggacgccagcagcgctcctttaaccaagaagggttcaattgcgtttgtcaccgcatgaaatatacgaagtcccgttgtcgggatggatacggccaggaggcgtttccgcacgtctttcccgcgaagatgaatgtgctgatggccggaaagcgccctccgcgccaaaataaactgcgtatacaagtaaacgaacaccacgacatcgcttgcgaccagcacaaataatgaaatgagcacggccatatcaatttcaaaagagtaccattgaaaaaagataaacagacaaagcacttgaatgatttttttcatgacattcgcaaccgcgatttttcccatttgctgcacacccataaaataacctctggcgatggatgtaaaagcgacgactggaatcagcccgatgacaatccctttaataaacgggtgatacgtatcgaatacaggaatgaacggcagcgcgatgcttgcggccgcggttgaaaacgcggtaaaaacggcggtcattctgaaggcatgccggagcatgctttcatgcagcttctgattggattccgcgatgaattttgaaatggagatcggaagctccagactggcgatgacgataattaaaaaaatggtgggcagaatgctcatgtaaagtcccatcccatgctcgccaagctcccgcgccagtatcatattcacgacaaattccagacattccgcgaaaaaggcggcgatggataaaagaatgatccctttcacaaatcgattcatggtgtctctccttgtctctcgttcttccatcatcatatgagacaagttctgaaaatattttcgatttctcaaaattgaaaaaagcatagccgggatatttttaatcccgctatgcttacatcgcaaatacgtgtctgccgatccgttcgataatttttcgggaacggatccagtggtcagatgccgttttcggattgtagaaaaacaacgcgttcgtttctctgcccggatggtcaagcgcctcatttgcggcagcgatggaatccttatccggcttttgattaatgcttccgtttgctaccggttcaaatgcgctcctttgatagatcacaccccgaatggtatccgggaagccgtttttttcagtgcggttcagcactacgctggctaccgcaaccttccctttataagattcacctttcgcttctgcgtgaacgagacgtgccagaagctgtctgtcagcgcgggaatacgtttttttcggcggctgataagccgtctcctccggtttggcttccttctcttggtgagatgacagctttatcggttggatagaatgcttatgatccgtttttgaaagcttcggaaccgagctttttttatttaaatcagcaaccagtgtgctgggttcttgctttggcttcttcgcaaaagtaaacagagcttctgtatgttcaatttttgatgcaggcataaaacatagaaaaaagacagccaaggcagcaaattttgtcgtcatacgatttcctccttaaatacttcactaccttaacaagagctgtgcgcaaattcacggttaaagattttccagtgctcccaatcagcttttatgatggaagaagttcgttaacagccttgttattggcaggaaaacagccatcattttcacaacattaaccaaatagcagtaaaagtatccatcggagggattttacattttgtttacatctgttacagccagatgaaatgagaaactaaaaaacaaaaaaaagactcctcaagtgcgaggagccgtcagcttcttggctgttctaaatactggaatataacatccccgccctgctgggcaataccgcggaaatgcttaaaatcttcctgcttcgataaaactgctcgaaatgcaagaaaatgttctttctgcaccctgaattctttgatttcaccggtgcgcatttggttgatacgttctgaaatttcctcaggcagcaacgaacacagcctccttttctcggctttttcccgaaaatcaatataccatctttcccccgccgggacaatgattgagcgggctgatacccatatcgctttacttcttaaagaaaatactgcaaaatattttcaaacaggatttatgataaaggagaggaagctcgtgaaaattgctaaggttggaaacgtcattgaatttaaaaacggattaaccggtattgttgaaaaagtaaatgaaaattccgtcatcgttgatgtaaccatcatggataattatcgtgatcttgaattagattccctcactgtcgtcaaccataagaattataaaatcatcagagactcctattaaaccccctcgaacaatccgaaccatttacatatcccgcacaaaagctgccgcccggcagctttttcaaatgaactcagatctccgtcatttctacaaaaaaatcaccggtctgatctttattgtaaagatttgtgacggatgtatggtagttggttattttaccgcggaattcaagcccgcgctcgggcgccttgatgtcaaatgttttttcatacaaaagaacggcaatatcatgatacgtttcagaggtcaccttcaatacaaatgaaatcatgcggccgtttttgcccgcactttctttacaatcatacattttcagccttacaccgtttaactctaacggctccataacgaacactccttctttttacaggacatgctatcatgctgaccattcctttacaattgatccgctccgaatgagaaaaaacagcgcaggcctttacaaacgtatgttccctattttataatgaaacagacgagctgccatccagcacccgtcacgtattgaagcggcgagtacactccccccgggtttactcgtctttttcttttctccaaatgatctctcttttccttatagaagttctgtgcaaatatcatgcacctttttggctgcgcggcacagacgaaaaatacccccgcttaaaaggcgggggtatttaggttatattccgagactgtactccgtctgaaaattaacggttgtcaatcgtctccgggtacatatcatgattcatcatccgatgttcggccattttttcatattttgttcccggtctgccgtagtttgtatacgggtcaatggagattccgcctctaggtgtgaatttgccccatacttcaatgcagcgggggtccattaattcgatcaaatcattcatgatgatgttcatgcagtcctcgtggaagaaaaggcaggtcaaagtcttgtcccataagtacttgctctagacattaagcatgaagtcacaccaattttacaccttaccaaacgattgattttaaccttttttggggactatttgtaatctctgcgcagtgaaattatacctgtgccagcccgccatctacgaacaattcaacacccgtcaagtaactgctttcgtctgaagcaaggaaagatacagcgtttgctacttcttcaggtgtcccaacttttccagctggaacagtatttctggcattttccattgctccttcaagtgcatcaccaaaaagctcatcatatgcaggtgtaagaatagctcctggactaaccacatttacacggatttcagtatcttttaggtcaagaatccagttgcgaactagtgctcttaatgctgctttagacgctccatatacactaaacgctgggttgccaattgatccagcagtagagcccgttacaataatagaacctgctttgtccgggaatagtgataacgctttttgaacagtaaagatggttcctttaacgttaatgtcgaacgttctatcaacctgctcttcagtaatttcacctaatggaaggaagttgccgatgcctgcattagcaaaaagaatgtccaacttacctttttcctgctttatcatgtcatatagtttgtctaagtcttcaagcttagaaatatcaccttgaacaccggttacgttcttgccaatttggttaacagctttatcaagttcgttttgtctgcgtcccgtgatataaacatatgcaccttcgtttacaaatttttgtgctgcagcaagaccaatcccacttgttccacccgttacaagcgctattttaccttcaaatttacccatacttaacactcctttagaattcattttattttacgtctagtacctttaagtacttgaagaacaacttacaagatatagtatccttcagtaagcacactatcggaagtacccacttttttgtgatatagtaactaaaaagtaataaatgtggaatggagagctttagacatgaaaaaatttagctgtgggtttgaagtgacaaaggaagtgattggcggaaaatggaaaggtcttgtattatactttttaatgaatggaccaaagagaacgagtgaattaaagcgcattattccaaatataactcagaaaatgctgattcaaacacttagagagcttgaagccagtggacttgtgagcagaaagatgtataatcaagtaccgccgaaggttgaatattcatccactgaacttggagaatctcttaaacctatcttgcaggagctctgtcaatggggaagccattatgcggagcaagagtatgcagaaggtgaatatgaaattgtacgttaggattgatgtagctgctggagtaaatgctaaacaacttcaataccatcgcctaacagatgaagaacagtcagaaataaatgagatattcaattttgaaagtgaagttctaataagaagtgtcatggactatattcaggagaactttgatgaaattcaaaaaagagctgtttcaaatgttaaagagaaggttcagaaacttagccaaaaaataaatgaagatattgataatcatatttaatgcctgtgatctctaaataggcatttttctttcggataaaaaagaaaagacgtacaaattgtacgccttaatctgcctctgtactatcaatttttcactcataaaagtcacagttcaggttgcaccaggtcacacttttattgagcttagtgcgggtcacacttcgctgtgactcggtcacaattccgctgaaaatcagcactgaatgttcggattttactgtgactccacttcgttttcacactccgtatcacacaacggaataattaccgattatcaatcgtctccgggtacatatcatgattcatcatccgatgttcggccattttttcatattttgttcccggtctgccgtagtttgtatacgggtctatcgagattccgcctcttggcgtgaatttgccccatacttcaatgtagcgggggtccattaattcgatcaaatcattcatgatgatgttcatgcagtcctcgtggaaatctccgtggttgcggaagctgaaaagatacagcttcagcgatttgctttccaccattttttcgtccggaatatagctgatgtagatggttgcaaagtccggctgtcccgttttggggcaaagcgacgtaaattccgggcagttgaatttaacgaaataatcacggttcacgtgtttattcggaaatgattccaaaacctccggcgcatattcaaataaatagtttgtcccttgattccccaggagcgtaactccttctaattctgattcttttcttgtcatataaatctccctttctattaaactccccgtttattgccccaaagcaatgtatgcagctgaggcaggactctgacgagattcagatccgaatcggctgaaaccttatcaacgagtgtttcgtattttccgagcagatgtgcgatcaatgcccggtcgtccgtcgtatggacgttatcgtttccgacctgaagataaaacgggatattcggataccgcttgtgcacggttttcgcgaattgcagatcttcatcattaaaaatgacgacctttaagctgaccgcgttaagcctttctgccgcatcaagcgaagacacaatgtgatcgagctttgcaaaatcggttgtcatccccgaacttggcggcttcggtgaaatcgtcaggtcgttaatcattgtgaaccaatcctgatagaccgttccctgcgtttctaaagcggcgcgcaccccgtgctctttcagcagcagaatcagcgcgtcaagctgctttaacagcgccgggtttcctcctgagatggtgacatgggaaaaggcgtctccgccgatttctctcagctcgcggtaaatgtcttccgccgtcatccagcggatatcttttttggctgagccgtcccatgtaaaagcggagtcgcaccagctgcaggagtagtcgcagcccgccgtgcggacgaacatggttttctggccgataaccatgccctccccttgtatcgtcggtccgaaaatttctaataccggaattcctttagccattcctatcaccttttttcgggcggtatacgcaatagcttgtcggggtttccctgacaaaaatctgcacgcagaccggctgattctccagtgtttcaaggtaggactgcaccttatcgtaaatcgttttggccacgacctcggtcgtcggcagtgaatatctgtcatcttcagaaaattcgtcatggtcattcagcaatgtatgatcgtaagcgccgtgcaccaatttcttcagcacgctgaaattcacgagaaagcctgaatcgtccagttcatcccccgcaactgtaatatttactgtatacgtgtgcccgtggactctgctgcacgctccggcgctttcgcggggaataaagtgcgcggctgaaatgtgcatatccttattcaactcaaacgaataaggatgctgaacctgcgggtaaatttgagaaagcaattagttccgctctcctttcattttcatatattcatcatatcctttattgcggagcaggcatgccgggcattcgccgcatccgtctgcaatgatgccgttatagcaagtcagtgtgttattctttacaaaatcaagcgcgccgagctcatccgcaagtttccacgtttctgctttgttcagccacataagcggcgtatgaatgacgaacggcttttccatcgccaggttgacggtgacgttgcaggatttgacaaactcgtcacggcagtccgggtagccgctgaaatcagtctcgcaaacaccggtgataatgtggcgcgcgccgatttgatatgcaagaatcgatgcaaaggataaaaatacaaggttgcgtcccggtacaaaggttgtcggcagttccccgtccttcgcttcaatttcgatatcatctcttgtcagcgcattcggcgcgagctgatttaaaagagacatatcaagcaagtgatttttgacaccgagcttttcagcaatcgattttgccacatcgatttcttcttggtgacgctgattataatggaatgtaacggtttccacttcttcaaagttttgcaaagcccataataaacaagtcgtgctgtcttggcctccgctgaacaccacaactgctttttcttttttcatgtctttctctcccttatctatcattccataaaaaaagcgcctttttcggagaaggcgccctaaaaaacataaaaaaaccgtatccaaggatacagctcgtccttagttttttatagagggtgtagctagaacctctcccgcatcaatacggattttcttcttttttcacttttgctatcataccataatgttgtttcccgtgacaataaaaaaacagcctgaaccctgtgtcaggctgcaaaagcgggattaagccccgcgttttttcccgggaaataccatcagcgcaatcccgatcagaacaaataaagcaggccagaaaacagaaaccggaatgatcggctgattcgtcatcataaaagaaagtgctgtcaaggtcagcaccgcaaccgggatgagcagcgccttctctttcccgccgaacagccacagctcaaataaaccgaatgccgttgcaagcagataaacaggccatgtcacaccggagtaggaccaattggttgccgtttcaaagacaaacaagatccccgtaatcaataagatgccgcccggtacgagaagtcccgcgtttttgacaggtttcgggccgaaaatcggaatgtgaaaagcggcgcccagcaaaagaatgagagcgggccagccgcgttcgctgatgacttcatttgcattggtgaatatgccgaaaatgcccgcggcgcacagaaccgcagcagcagtcaaaagccctctttgccttctgccgaacagccaggcttcaaacaggccgaacgcaacggcaaagaggtagacaggcgatgtcacatttgcgtatgtccaatccgtcagcgtttcaaaccataacaacccgcccgtcacaagcaaaatgccgcccggaataagaaggcccgatctttttttcggctgcataaaggcagcggcgtgaaacaaaagcgcggcggcgatgatcaaaagcggccacagccccgtcatcagcataccggcaaagcatagagctcccacggctgtcaggatgaaagcaggaatcaatacacctaacttcctcccgccgaaataccacagctcaaacagaccgagagcaggcgcccatatataaacaggccacgtcacgcctgaatacgtccatcctgttgcggtctcaaaacaaaagaggcagcccagcacaagaaacataccgcccggaacgagcagtcccgcctggtcaggcgtttttttcgcaaaaataaatccggcgtgaaaccctgcggacattataatgaaaagaaacggccacgccgaacctgcggatatatgtataactcccgccttctgcaaaaaaaacgcaatgccgatacaaataaaaataaatcccaataatacacgtcgagctttcatctcttactcctccccatcatttcccaattcattatacagaaatgtcaggaaaaaagaaggggaattcccaaaaaatacagacattttccttatatccttatttttctttcgggatttttttgcaaatcaatgcgccgatgaaagcgaggctcacatatccaaacaccggataaacggtggaaatcagctgtccgtagccgatttggctgataatgaaagcaaacgccaaaatgccgccgtaaatatatgtacttcttatatgaagaaaactgtttaattgtttttccaatccgtataaattgccgatgaccgacgtaaacacttccccgaaaataataaacaaataaatgatatgaagcgaacgcgaatacgaatagacaacttgagccatcggaatgtcaaactccagcacatccggcagcaccgataatgataaaaagctcgcggcaagcaccagtgtcaacagaacgccgcctatataagccccccttctgatcaccttctctgaagacatttcgttcgcaagcggcacaaggacggcttgggcgagcgataaatttaacgcgccgtaagagacggcggacaaaagccaattccacttgtcaggccatacccattcgtccgcgtttctcgtgcttgtaaatacaaatgaatcagctgtcacgataaaagagaaagaaattaaaagcggcacaaccaatatattgacgccgaacacacctttaacgccgcttgtcatgacggcaaagctcagtacgatcgtcagaaggatccccgcttgtgcgggccagccaagctgttcatgaaacagcgctcccgctccggacagcatgacagaggtcactcccagcaatataaacatcataaacatgtttacggcgcggccgatggactggccgaataaatatgtgttcaattcctgataagatgctgcgtgaatccgtttggaaatgatcatgattttggcgcctaaatatgtaaacatcagaccgcttaacacgatacccaacagaccgatccagccaaacttcagaaaaaactcaacgatttcccgtcccgtggcaaaaccggctcctacaaccgttcctacgtatacaaatgcaagctgactcgcagaaccttttgtttgtcccatttcaccctccggctaagcgcagatttgtccaggcctttatatatgcttatgagacaagtcgcccgaaaagacgaacaaatcgtccttccccgaagaaaacagattcagctctctcctctaagcaaaaatattgaaagaaaaaaagggcctgcgtatactcttcatcaagaaaggtcaaagcatttcatttcctttctgactatattggtcaaaaataatcaaaccttataaatatcacttatcatgctgtaaacatttgttttcggggtttaaaacaaaacacttgaaagtcaaagaaggtcagattatactattaatcaaagaaggtcaaagttaagaccttattttctaatccgtttggtcaaagatgatcaaacatttttcgaggaggttttggcaaatgcgttgtcaacattgtcagaaaaacgaggcgacgattcgcctgaacatgcaagtcaattccattcaaaaacaattcgttttatgtgaaacatgttatacagaattaacccgaaaaccgtctatgagcatggggccgcaatcattcggattcccgtttgagcaaggtttcgctcccaatcaaaataaacagcaggccggccctgaaaaaggcctgctcgacgagctcgctcaaaacgtcacaaacggcgcaaaagcaggtctgattgaccctgtgatcggccgcgataatgaagtggcgcgcgtaattgaaattttgaaccgccggaataaaaacaatccggtgctgatcggtgagccgggcgtcggtaaaacggctattgcagaaggcctcgcgcttaaaatcgctgagggcgatgtgccgaacaaattgaaaaacaaagagctttacctgcttgacgtcgcttctctcgtcgccaatacagggatcagaggccagtttgaagaaagaatgaaacaattaatgaacgaattaaaagaacggaaaaacgttatcttgttcattgatgagattcaccttcttgtaggcgccggctctgccgagggatcaatggatgccgggaacatcctgaaaccggcgcttgccagaggcgagctgcaggtcatcggggcgacaacgctgaaagagtaccgccagattgaaaaagatgcggcgcttgaaagacgcttccagcctgtcatggttcacgagcctacaatagaacaagccatcagcattctggaaggcattaaagataaatacgagaaataccacggcgtcacattcagcaatgaagcgataaacgcctgtgttacgctttcatcccgttacattcaggaccgccacctgccggataaagcgatcgacttattagatgaagccggctctaaggcgaacctggagcttgataccgtaaatgaagaagatgcggctgagagactcaaagcaattgacgcggagaaaacaaaagcgcttcatgaagaaaattatgagcttgccgcgaaactgcgtgatgaagaagcggcgttggaaaagcagctggcgcatgaaacaccggcctcttcacctgaaatcggggcggagcatattcaagccatcattgaacagaaaacaggcattccggtcggaaaactccaggctgatgaacaagtcaaaatgaaggaacttgaagagcatcttcatcagcgcgtcatcggtcaggaaaaagccgtgaaaaaagtggcgaaagcggtcagacgaagccgcgccggcttaaaatccaaaaacagacctgtcggctccttcctctttgtcggaccgaccggagtcggaaaaaccgagttatcaaagacactcgcagatgaactgttcggtacaaaagattccattatccgtctcgatatgagtgaatacatggaaaaacacgccgtatcaaaaattatcggttcaccgccgggatatgtcggacacgatgaagccgggcaattaacggaaaaagtgcgccgcaatccgtacagcatcgtgctgctcgatgagattgaaaaagcccaccctgatgtccagcatatgtttctgcagattatggaggacggccgtctgacagacagccagggcagaacggtcagcttcaaagataccgttttgattatgacaagcaacgctggaaccggcgaaaaacaggtgaaagtgggattccaatctgaagagagcgtcctggaagaacaaacgctgattgattcactgagcgcgttcttcaaaccggagtttttaaaccggtttgacagcattattgaattccaatccctgaaaaaagaacatctcgtgaaaatcgtcagcctgcttctcacagagcttgaagacacattaaaagagcgcggcatcagcctgaacgtcaccgatgatgcgaaagaaaaaatcgctgaaatcggctaccacccagctttcggagcacgcccgctcagaagaaccatccaagaattgatcgaggacgaaatgacagatctcttattggatgacaacgaaataaaagccttccatgtcgtaatggaagaggacggcatcaaagtccgggcacaataacaaaaaagcggttcccttctcgcggggagccgcttttttgtttctatctccatgccggaagggagaaactgtgaagaattcgggaacaatttctcaatcaccctaaagttccatgcactgccaccgatattaaccatagaaagctagtataaaggatttggtgaaaactatggataaaacatcgattatcggtatcatcctcgccttgattgctttaagcgtgggcatggtgctgaaaggggtcagcttaagcgcactcgctaacccggcagctattctgattattttgttcggtacgatttctgcggtgatcatcgcattccccggaaaagaaatcaaaaaagtgcctgccctttttaaagtgctgtttaaagaaaacaaacagctgacaattgcgcaattaattcctatgttctctcaatgggcgcaaatcgccagacgtgaaggtctgctcgcattggaagcaagcattgaagacgtggatgacgcatttttgaaaaacggcctgagcatggcggttgacggacaaagcgcagaatttatcagagatattatgactgaggaagttgaagcgatggaagacagacaccaggccggcgcagccatctttacacaagccggcacatatgcgccgacactcggcgttttgggtgcggtcatcggccttatcgccgctctttccaacatgaacaataccgaggcgctcggacatgccatcagtgcggcgtttgtcgccacccttctcgggattttcacaggatatgtactatggcatcccttcgccaacaaactgaaacgcaaatcaaagcaggaagtcaaactgcgtgaaatcatgatcgaaggcgttctgtcagtgcttgaaggacaggccccgaaagtgatcgaacaaaaacttctcatgtatcttcctgcgaatgaacgcgcaaaagtcgctgaacaagaaggagaggcaaacaatggcgagaaaaaagaagaagaagcatgatgacgagcatgtggatgagtcttggctgatcccgtacgcggatttgctcacccttcttttggctctgttcattgtattgttcgccatgagctcggtcgatgcggcgaaattccaaatgctgtctaaatcatttaacgccgtgtttaccggaggcacgggtgttcttgaatattcaagcgtcactcctcctgaaaacgaaaaagacggcgttgatcagttaaaaaaagacaaggaaaaagataaagaacagaaaaagaaagaaagagaagcagccgaccgcgaagaacttgaaggcgtgcaaaagcaagtcaatcaatttataaaaaataaaaagcttgaaactcagctggaaacaaagctgactaaagaaggactcttaattaccattaaagacagtatcttttttgattccggacgggcggatatccgtcaggaagatattccgcttgccaaggaaatctcgaatctccttgtgctgaatccgccgaggaacattatcatcagcggacatacggacaatgtgccgattaaaaactcacaatatcaatctaactggcatttaagcgtcatgcgggccgtcaacttcatggctattctcacggaaaacccgaaacttgacgcaaaagtattcagcgccaaaggtttcggagagtataaaccggccgtgtcgaacaaaaccgctgaagggcgcagcaaaaacaggcgcgtcgaggtattgatacagcctagaaacgccgcgactgaccaaaatcagtaatataaaaaaggaagcctttcaaatggcttccttttttatttctgatgaaaatgttttgcgtttaaccccactcttttcagcatttccgtacacatttctatctcttcatcactcagcacactgatcatttccttaatttcttcagcatgatcagggaaaatatcgtccaaaagacggattcccttttcagaaatctgtgcgaaagtcactcttctgtcagtcggcgaggcttttctgatgagaagttcttttttctctaatttgtcaacaacgtatgtaatacttccgctcgctaataaaattttgtcgccgatctgctgaagcggctggttgcctttgtggtacagcagctcaagcaccgcaaattccgtcgggttcagaccgtgcttatgaatatgtttattcatatggtcgttaatagatcggtacgcacgtgacagtacaataaataatttcaatgagttttctgttttatccgtcatacattcaatcatccttttacaaaagaaaccgttacagagaaacattaataaacaaaatgaaaaatgtcaacaaaaatgtttccaaaatttctcttctttttgtctgaccttaataaaataatttgtttttctatcattttggttattttttcttattaaagaagtataaagatgatataatacctctattcaagtgtaatgttggagcgatgcagagtgaatacatttaaaggtgcccggggaaagatcaagctttatctcatattggtgatcatcccggcacttattatcagctttttcatttatgaaaaagaaaagcagaaaatagccgataaacacatacaggaagccagtatgatgctcaaccttcaccgcaataagctcaattatttaatcggtgaaacaaaagcccggatgacaacacttgcgatcgctgtcgataagcctgtcaatgaagaaaagatcattgacattctcgatcaggcttttgaggatgaacccagattcagcggactgtatatgctgaattccaaaggtgatgtcatcgcaagcacgactgatctgaaatcaaaggtgaatttggccgacagaccgtattttacgaaggcgaaaaagacgaaaaaaacggtcatcacaaatgactactccagcagaattacaggccagcgcatcttcacgatctgcgtgccggtgttagacgcaaaacgggaagtcacggattatttagtagccgccatacaagtcgattatttgagaaatatgatcaatatgctgagccctgacgtttatgtcaaggcaaccaatcagaataaagtgatatttgccagcggacgggctgatcaatcagaaggtgtgaaaccggtcagcggctatctggatgatattaattggaatatcaatgtttatccgaaaccggttgagctgaatgagctgaccaaaagcgtgctgctgccgatgtccagtattgccgtgctgctgaatattctgttcattctcgttcaatattatctgcttaagcgcaagacccagctggagcgcgctcaaaatgaagcgcagaaattggagctgatcggaacgcttgccgccagcaccgcccatgaaatccgcaacccgcttacagggatcagcggcttcattcagcttttgcagaaaaaatacaaatcggaggaagatcagctgtatttctcaattattgagcaggagattaaacggatcaatcagattgtcagtgagtttttagtgcttggaaaacccactgctgaacggttggaagtgaactcgctgcaggatattcttgatgagattatgccgattatttattctgaagggaatctgtataatgtggaagtgaatgtggagattctcgtcaatcggccgctcaaggtcaactgcacgaaagaccatattaaacaggtgattttaaatgtcgcgaaaaacgctttggaatccatgcaggaaggcggccggctgtccatctatttagaagcccgcgatcataaagcagtcattaaggtggccgacaacggaatgggcatttctgaagatatgcttgaacacatttttcttccgtttgtaacgtcaaaggaaaaaggcaccggcctcggccttgtcgtatgtaaacgaatcatgctgatgtacggcggttcaattgacattcaaagcgaagtcgataagggcacagaggtcaccattaccctccctgccgcttctcgatgaaaaaaacaccctggatcggggtgtttttcatttaaagaagaatatgtgtaagaggatataccagaggaacggcatcatggccggcagatagtacgaggcgcttcgtgagccgtgccagcggaaaaatgtgctgactgtacgcggtcatctttcggatgcggcgcttgatcaggaagcgcattcagtcttcgttatctgttttatcatcaatcatttgtttgcttcatatgcaggcatgacgtcaccgcgggagaacaagcctattttcttcacaaggccctgtattccttggtgatgtgtgcgatcacggtttaccagctgctgatacgcattcatcagacagtccagttcctggctgtgcctgatcgtgtcatatcctgtaaacccttgcctgttagccgcatctatcatcatttttctttttttatcaatagatacaagcaatttttcttgttcagaataactgcccattcacttcacccctcaccgctaaaagaataggaaacaagtttgattgggttattgagcattattacagattatactttatttgtaaacatttttttactaaataacttattttttcatttcgtattggaatctttgcatgaatacgagaataatacccattcgggtaatgatataaacagaatgcggcatattcaagatttaaaaaacagccacagctgactttacattacaataaaaaacctctcatgccggcgggggcatgagaggttcggacgtctatcagttttgcacactttcattctcgtaaatcggcacccagccctcagtcgtcacgaagattcggattgcgacgacccggcggtcttcctgaagcgtaaagtagtggcggatgttctccggaactgaaatcaaatctcccggatttaaacgaacgtcgaaaaatgtgccgtctttgccttgaatgacgaagatgccgtgtccgctgacgataaagcggacttcatcatccgtgtggtgatgttctctttggaaattttttaataattcatcaagattcggcgtggtatctgataaagaaatgacatcctgagactgatatccgcgccgggctgaaatgtcctgaatctccgtgtcaaacgccgcgagaatccgttctttttcatcttcggttagatcgaatttttccgaaagcccagacggaagtttttcaatgttccactgctcatagatcacctcttgttcgtctaagaagcgcgctacttcttcctgtttttcaatgagcgtattcttttcgtcatgaattctgatggtcgccattttctattcctccttttattttaccagctgcggacgaagtgacagaagcttgaggtgacagctgaataaaaattcataggcttccagcacccttttcgcttcaaatgcggtccgcccccatgccgtaatgccgtgattgcggattaacaccgcgcctgcgccggcgtccgcatggtgtgcgaagttttcggccaatgccgggatgtgcgccggattgtcaatgatcggaacggtcacggacgcgttttcctcccataatccgagcgccttaatcatctcctgcccctgaaaagtgatttgtttttcatccccgtaaagctctgagatgacattattattgacggtatggacatgcagacagcagccggcgtctgtcttttggtataagtaagtatggagaagcgtttccgctgagggttttaaagaatggccggtctcagcgggcttcccgttcttatcgattaagagaaaatcttcgtctgtttcttttcgtttgtcttttccgctcgccgtaacgagaaaagtcagcggcccgtcggatactttgatggaaagattcccgctcgttgccgggaaccagtctctttcggccagttcgcgttttacctcggcaagttcgcgccagcgttcttcttttgcagccatgcctgcacctccccgatgttttcaatgcctgttttcacctcatgaaaatcttgaaaaggcagatgccggaggccgagttctttgcattcagtcaaaagataatctctcgcaaagcacatatccgataactttgcagcctcgacatccgtgaccgaatcaccgatcataacgagaaatttctgctgatcggatagcttacggatgactgacggtttgcagcagccgcattgattggtacattctccgtcacaggcgtgcggccagtctatatgaatatattcattgtcaaaggatgcatgattgcagaaaatccgctccttttctacgatcccttccaaaagcggatgcacaaaaaagtccattcccccgcttacgatataaaacgggaggccgtttgaccggacaaacgagacaaaatccaaaaagccgtcccgtattttcgcatccttcaggataaaaccggtcagttcttcttttaagctgctcggcagcagtccgaacatccgtccgactccttcttggattgatatgcttttagacagaacaccgtcttttatttcaagccactcaggaggcgcgaattctttcatcatgctgacaatgttgtcgttcatggtgaccgttccgtcgaaatcacaaataatcagcggtgtgcgggtcatacggcttccacccttccccatttgtctaacgcgagctgaagatctttgcacgacgcggctttttcttcaatcggctgtgcttcaagcaccgcatcaatgacggcgcggaacgcttttccgccgccctcggctcctttcggatggccgtgaatgcctccgccggcattgatgatgtaatcgatgccgaaatcgcgcatcaataatggcaccataccggggtgaatgcctgctgacgggacggcaaacgacggatgaaagacatcgtcttttacacattcatcatggattgcaagtgcggactccttcggaagagcaacggatccgtaaggtgacggaaataaactgaaatcagcgccgcaatagcggttcagcttgccgagcaaaagcgcatgcgacaagccgtaaacgggagatgatgtgaacgcgccgctgactgccggatgcgccatgatcggaagcgggatttccctgtcttcagcaaggctctgcatcacatctaaaccgtaagcgaacacattcaataaaagcgcgtccgccccgagttctgccgcgcgcctcgctttatcccgcaattcagcggtccttcccgtaaggtttacggcatacagcgttttatgccccgtctcctcccgggtttccttcaggacttgttttccttcgataatgcgggtttcaaacggagccagttcattttcaaagaaaatttcgtcatctttaatcagatccacgccgccgagcgcctgctgtctgagctgatctttaatgtcggcgagatcccgtccgatcacgcctttaaatatgctcatcagaagcggtctttcaaattcgcccagcagtttgcggatgccgtatataccgaatttcggcccgggaagggagcgtttaaacccttcggaaaattcaagatcagtcaattttatttttccgtccagtgacagctttccgaataccgtcgtcaggacggccgggatatctcttgaaaagttcgcctcgggataggcgatggtgatgacggattgtgtttcgttttctgaggttccttctttctcctcaacttttacgacccgccctttatgttttctgagctgttcctgcttcaccaggggcagttcagtccaggagcctaccgtcagccccgccgcaatctgttccgcccgcttttcactgtccgttgtgtctgtcagaagatatgttgccaatacttcgctcatgcgtgaacgcctctctttctttcgcaaaacataaaaaaacctcttccgtatgagcagaaagaggcttcgtgttatgtccgaatcttatctctcagctcctgctgcaagaattagcaccgtgctttatcagtcggttgccgggcttcatcgggctcgtccctctgcctgctcttgataagaataatgattttataaagtattttgaattatcgcattgttatcctgatatgtcaatgctttttcgggtgaaaagattcagtttcccgatccgttccgcagcttctttaagtctttcttcacttgtcagaagaccgactcttatatagccttccccccattttccgaacccgtttcccgcagcgaccgcgacatccgctttctcgagcagcaggtctgaaaacgactgtgacgtataaccgtcaggcacagggagccatgcaaaaaaggagcccgccggagccgtcacatcccagccgatatcgcggcaggcttcaatccatgcattacgtctcgattcatatctgtcattttgcgctgcgacgcatgcctgatccgctaaaagagcggctgccgccgcctgctgcgccgcgggaaacaggctgacaaacatatgatcctgataaaggttgatcgcttcgatgacagaagcgtttccgacggcaaatccgacccgccagcccgccatattatacgttttggacaaggtatagatttcgattcccgtctcttttgcgccttcggtctgcaaaaagctcagcggtttatgcccgtcaaagccgacggctccgtacgcgaaatcatgaacgacacaaatgccgttttgttccgcaaaaccgaccgtctcctcgaaaaacgcctctgttgccacagcgccggtcggattattcggataattgagatacagcagcttcgcctcgctccgcaccttttcaggaattacgctgtaatcagggagaaaccctctttcttctgtcagcggcatcatttccattttcgctttcgcaagggcgacgcctgaccagtaatcaggatatccgggatcaggcaccagaatggtatctcccgggtttaaaagacattgcggaagctcaacaagtcccgccttgcctccgaacagcacggcgacttccgtttccggatcaagcgtgaccccgtactccctttcataaaatgcagcggctgcttttttgaagctgtaagcgccccggaatgatgagtatttatgattttccggcctttcgacggcgcgcttcatttcttcaacgatatgctgaggcgtcggctgatcagggtttccctgccctaaattgatgacatctctgccttctttcagcttttgattcactttttgcaccaatgatgcgaaaaattgttccggcagctgtttgagtacatctgagatttcaaagttcatattttcaccttctaaaaatgtcttgaaatgatagtccatcatcatatatggttaaataaaaaaagtaaagagaaacttgaggtgttaaaaaatgaaatggaccgtttcctgtttgcaatttgatatttcatacggaaatccttcagaaaactttaaaaaagcagaatctttgattaagcaagaaagccgccatgcggatgtaatcgtgcttcctgagttgtggacgaccggctatgatctcacacggctagaccagctggcggatgaaaacggcaaagtttcggaacaatggcttaaagaaacggcaaaaacatacaacgtacacctcgttgccggatcttttgcggttaaagaaggcgaaaatgtctataacaccatgtacatcgccgataacagcggacagatcgtgaagcggtatcagaaagcccatctgtttcagctgatggatgaacacctttacttggcagcaggaaacagcgacggttcctttgagcttgacggtgtcaagtgcgccgggctgatctgctatgatatccgtttccccgaatggatcagaaagcatacgtcccagggcgcgaatgtcctgtttatctctgcggaatggcctctgccccgccttgatcattggcgaagcctgcttatcgccagagcaattgaaaaccaatgttttgtcgcagcctctaactgcacggggtccaatcccgataatgaatttgccggccacagcctgattattgacccgtggggccggattttagccgaaggagaccggacggaaggcgcagtccgggcggaaatcgatgtgtcagaaagcgcggacgtgcggggaactattccggttttccaagacttgcggcgtgatttatattaatttccaaaaaaatgttgacaagaatatccggcacctgctaatattttcatcaactgattaatccgaattgtgatacaaatcaatatatttttctcttatcgagagttgggcgagggattggccttttgaccccaacagcaaccgaccgtaattccattgtgaaatggggcgcgtgatttttgcgccgagacgattgtctcataaggcacggtgctaattccatcagatgttatctgagagataagaggcggactgcactgtttcagcctccttctctttcagagaaggaggctttttttcgggcgtattctccgtcacgatctcttactgccactacataattggagggtaaatccatgtcagcaactaaaacaagtctttatgaacaattaacagaaagctccgccgccgcgttagccgtcaagctcggcttattccaaagcaaaagcactctgacatgccgtgaaatcggcgacggcaatttaaattacgtctttcatgtttacgataaagaaaacaaaaaaggactgattattaaacaggcaatcccttacgcgaaagtcgtcggtgaaagctggccgcttaccattgaccgggcgagaatcgaaagcagcgccctcatccgccagggcgaacacgtgccgcacctcgttccggccgtttactattccgatactgagatggccgtcacggtaatggaagacctctcccatttgcggatttcaagaaaagggctgctggaagggcagcattatccgaacttatcggttcatatcggtgaatttttagggaaaacgcttttttactcatccgattatgcgcttgatgcgaaagtaaagcagcagctcgcaaagcagtttacaaatcctgagctttgcaatattacagaaaggcttgtgtttacagaaccgtttctcgaccatgagacaaacgattttgaagaggagctgcgcccatacgcagaaaaagtttggaacaattcccggctgaaagaaggcgctgacgaattgaaagccatctttctgaattccgcggaaacattggttcacggcgatctgcacacgggaagcatcttcgcagatgaacatgaaacaaaggtgattgatcccgagtttgctttcttcggaccgatcgggtttgacatcggccaatttatcgccaatctgctcttaaacgccctcagccgcgacggtgacgacagacagccgttatatgaccatactgccgccgtatgggatacatttgtgaaaacattcagtgaagcatgggagaaagactgcctgccttcccgcagacacctgctggaagacacactgaaaaacgcgtttgaggaagcggtcggttttgcgggatgcgaattgatccggcgcacgatcggactcgcccacgtggctgacttagatgaaatcactccgtttgacaaacgaatcgaacggaagaagctggcgcttgacatcggcgcctattatatcgaaaacagaaaaaaactgaagcatatcaccgaggttctggaccaatttaagctccgtgtaaaggaatgatgcagcatgaccaatgaatttgccatcccccgttctgtagaatggaaagaaacctacattcgcattttaaatcagcaaaagcttcccgacgtcactgaatatgcggaacttgaaacaaaggaagatgtattcgacgcgattgtcacgctgaaagtaaggggcgccccggccatcggtataaccgcggcgttcgggctcgcgctctccgccaagtcgtttgaagcccgcgacctttcagattttcgacgtcagttcgccgacgtcaaagcgtatttaaacagttcaaggcccactgccgtcaacctcgcgtgggcgcttgacagactgacggattccatcagggatgcgatctcaatcaatgaagcgaagacaacgctcgtccatgaagccattcaaattcagattgaggatgaagaaacatgccgtatgatcggccaaaatgcgctgcacctttttaaaaaaggcgaccagatcatgaccatctgcaatgcgggctcgatcgccacaagccggtacggtacggcgcttgctcccttttacttagcaaaacaaaaagacctcggccttcatatctacgcatgtgaaacaagacccgttctccaaggatcacggctgacggcgtgggagctgatgcagggcggaattgatgtcacgctcattaccgacagcatggccgcccatacaatgaaggaaaaacatatttctgcggtcattgtcggcgctgacagaattgcaaaaaacggtgatacggccaacaaaatcggaacgtacggcctcgctattttggcaaacgcctttcaaattccgttttttgtggccgcaccgctttcgacatttgacttgcagattgaaaacggcgatcagattccgattgaagaaagagatccggatgaagtcagacagatctccggcatacgcaccgctcccgaggatgtgccggtcttcaatccggcctttgacatcacaccgggcagcctgatttccggcattataaccgagaaaggaattgtgaccggttcttacacggaagaaattgaacaattattcgctgactgccagctgagctgaaaaaccgctgatgatgttgcctcaggcaatgtcagcggtttttttgtctgcacaatgtaatcacttcatctttttggacggctgtaatgagatgcattttaaaaaacagctctgcataaccggctatcttttgcggacggctcattttcatcaggcttcgtcctcctttttcatcagaccaacttttttcacttaataaaatgatatgtcggacgtgaaaaaacggaacgtgccatacgctttatttttctttataggatatttgttcgatgttcagcagcaccgcttttacatccgtcttcgtgccagcgtatcccgttaaggcgctgtttttgccgattacccgatggcacgggatcaaaatcggcagccggtttcgtttattggcttgtccgatggcgcgcaccgctttcggttttccgatcgcttcagccatatcgccgtagcttcgggattccccgtaaggaatcatcgtcagcgcgttccataccctttcctgaaagggtgtgcctttttgtctcagaggcagagagaattgctttctttctcctgaaaaatatgctgtcagctgctgtttcgcctccgacagcaaagcggtttcgcacggctttacgccgggcgcgcctttccgccatttctcaaactcttccccggtgagaaacaggccggtaataaagctctcttcctctgttacgatgacggttccaaacggcgctttcacacttgtaaaacagatcattccccgctccttctttcttccgtattctgccggaccggaagcgtcaaatgaaaaaccgtgcccttcccttcttcactttccacatgaatgcggccctgatgctcttcgatgattttataactgaccatgaggccgaggcccgttcccctgtcttttgtcgtgtaaaatggttcacccagacgttttaatttgtcttcggaaatgcctgttccttcatcttgaatagaaatcaaaatgtggtcttgatcagaagactgaatggtcacgtagatattgccgccgcccggcatgacttcaattgcgttttttaaaatattgataaacacctgttttaattgattcggttcacagtaaatcggcgggatgtttccggtcaggttcagatggatctgcacattaacaagattggcctgggcattcaaaagatcagccgtgtctttcataatctgcgtcacgtctttttcttcatataatatcgcctgaggtttcgctaaaattaaaaattcagtgatgatagactcgatgcgttttaattctgaggtaatgacgttaaagtacagagaatattcaccttcaatgcttccttgaagaagctgaatgaaccctttcagcgccgtcatcgggtttctgatttcgtgggcgatacccgccgccagctcccctacaacatgaagagtgtcggatttccgcagcctctcttcaagctctttggcctctgtgacatctttaaagatggccagattcatattttgaatgatatttcttttgaaggagaattccagtttgcggctgtcgctgctgcttaacaggaaggggatttcattatccattccttctaaatcaatctttctggcgggaacacccgcgttttcaatatcaaataaagaaagaatatccggaacggtgtacgctctcagctcctcatccggcataccgagtatacggcttgcgagaggattcgcgtcaataatgcggaattggttgtcaaataagaccttgccgtccattgagccgttgaatacttttctgaatttcagctcgctttcccgcaattctttttccatccgcttacgatcactgacatttcttaaaatggttaaatgctgaccttcaagtatggttcgttttgatgtgaactcaagctctttaaattggccgtttgccatctgaaacagcatttcttcacggatttctccgtatttttcatatttcttcttaatctgcttgtattttttctgcggatcaacgataaacgtacataaattccgctccaccagcttatccatcggcagttcgaaaatgcggcacgccgattcgtttgctttggcaatctttccgtcatcagaccaaatgacaatcgcgtccatggcgttttcaaaaatttcgcggaatcgctcttcgcttttaaagagtttcaattccatcaaccgtttctctgttatgtctctcataatagacatgtagaacccgctgattaagttggacgtaatcgtaaattcaaacagcttctcttcgccggaccgaagcttgacaggcagttctcctttggcgtttccttttctgcggagggtttcccagatttctttcagatgctttttgttttctccgtcggtaaaatggcggagcgacagatgggacaattcattctggccgatctcaaagcttttgcaaaaagagaggttcgcatcaataaacccgccgtccttatcaaacagcacgatgccgtcgacagccctgtcaaacaaatctttaaacagctgctcgttcatggagaattcgcgctctaatatttttttagaggagatatccctcatcaccacaaaaaaataatcctccccaattccgtctctggcgaggaattcaatgtatttcgtcgcgccgctgtcaagcttaatcggcacctctttccacagatggcctttttttaaaaactttttcacggccttattcagttcttcctgaggcacggaatataaaaaatccaggacggagcggttaatgaggctctctgcctcaatctgcatcatccgggccgcagcctcgttcgcctggacgattttcatttccttacggcatataaaaatggcatcaagcgtgttattcataatcacgtgataccggttcaaatcactcttcaggcggtcattttcctctttcatccgcttcagctgctctttcagcgactcttttgtttgcaaatccagagtttcagccattcagtacactccttcttcaaaaacctatccttcaatatttctacaaaatacctcatcttccttcattcgccctatacatttcagaaaatttcaatgatatgacaagttaaagtctttttctacgatccttacctccccattacatcatcctaacaatcccttttgtcctccttcaattttttattttttattttaaaatgaacaacaacaggaaataatcatgcagtggatgatttttgaagagaaggtgatgctatgacaaaatcgcgagacagttactttgacaacgccaagtttatcttgatttttctggtggtgttcggccatatcctccggtcatttattaacggaaatgagtttatgctccatctctacaaattcatttatacttttcatatgccggcctttatcctggtttccggctatttcgcaaaaaactttaagcggaaaggttatgtgaagaagctggctgtgaagctgattattccgtacttgatttttcagggcatttactcagttttttactatttgattcaggatgaaagcatggcaagcgtcaatccgattgatccgcagtggtctctctggtttttagtcagcttattcttttggaatctgctactttatccctttacgaagctgccgaaaatgtgggcgcttggggcgagctgcgggcttgccgtcatgatcgggtatcttgattttatcagcagcacactgagtctttcacggacgtttgtctttcttccgatgtttctcgtcgggttttatttaaagaaacagcactttgatttgcttcgggctaaaagaggcaggcagattgccgcgggcgtactggggattgttttcctcttatgctggtgtattgattttgattactcgtggctgttcggatcggagccttattctacattcggcacagtgtcgctgttgagcggtctgtcgcgcatcggctggtatgttttggcctttgccgccactttcagctttttagcgctcgttccgcaaaggcgttatttctttacgaaatggggtacgagaacgttttacgtgtatctgctgcatggattcattataaaaacgctgcggcagatcgggcttgaagatcacttgtctgattatcagaatttagtcatgctcttaattttaacggccgctcttacgtccattctctccagcaatgcggtgaaaacggccgcacagccgtttattgagctgcggataaccggtttgcttgaagcggtgaaaggaacaagaaacggtgcttatttgaaataatgcaaatacctcttaagcgttgccgcctaagaggtattttttattgtttgccgtcttcttttttctttggcttcgtctgttcaagcgtttcaatccattttccggcgttataatcaccgagctcgcttgcaaactcttcttcaagcaatttagggtccatcggctttttatggttttgcatgtctttgctgtggcggttttttttcgtcatgttactcgcctccttgtttgccgtgttttgatttgcggtttgcgcctctcagtccgggatcaccgtcatattgtgttttgtatgcatctttgtccatgctctcagtcggtgtgttgttgttggtcaaagcttcattctttgctgctttgcgtttcatttgatttcctccttctgtcagcaaatctgttttgaattcatcaagcatttctttcaagtcgcgcactgtcacgtttttggcctcatcaatgagttcatagccgatctgtccgttcggctcaagcagcacatatttaaaatcttgaatgtctccgaggccttcctgcctgatcctcattgacagctgagcttcggtaaaacgcattttttttaagttttccgggatgatttttccgtttctgacaacggcgacggtttttcctgaaaataaaaactcaaaaaaacttgatttgatttctaaatattccatcaggattaataccgcaataaaaatcgccgccgcgaaaatggtttcccataaattatgttcaataaacggctgaataataatcgagccgatcgaaatcatgatgactgtctgggtcaccgacagctggctgattgatttccgtccggcaatccgcaataaaaaggtaccgaccgctatcataattaccgacttccaaaatacggcaaacaatgacgtcacctctttacaagtagaatctccaaaaaaactgtttccacacatccattttacggcaataaaaaacaccgctttctgaaaagcggtgtcagccgataatcattctttccttcggatagtgataatttgcttcgatttcttttcggccgatcaaataaaggaacgtcaaaatgccgatccggccgataaacatcacaatcatgatcacgcattttccgatgtcgcttaaatgcggagtaatcccaagcgacaggccggtcgttccaaatgcggaacacacttcaaaaagcagtccgaggagcgtctgatttttctccgtcacggacagaatcagcgtcgatccgaacacgagcaaaatcgccatcatcgtgacgaccagcgacttcatgacatcagcctgatgaagctcgcgtttaaagaccttgaccgctttattcccccgggcaaaatgaaacagggcaagcaggttaagcgcaaatgtcgtcgtacggattccgccgccgaccgagctcggtgatgcgccgataaacatgagggcacagatgaaaaataatgtcggcgccgacagctggctgatatcaattgtcgcaagcccgccgcttcgcgtagcggttgattgaaagagacataaaaataaaacatcatgccagcttttccccttcatgacatggcttgcttcaagcgcgtaaatgcccacggctccgaacaaaacgagcattccgaacgtaacggtcgtaattttcgtaaacagcgtgaatgagtatctgcgctgttttgaaaacaaaaagtcttttacttctacgagcaccggaaaaccgatcgcaccgaaaataatcagaagcatcgtaataaactgcacgaaatagtcatgtctgaacgggacgagtgaatttcccgtaatatcaaaaccgccgtttgtcgtggcgctgacgctcgcaaagaatccgtgcaagtacgcctgttcaaacgaatcataatacgttaaaaaatatgttcctaagatgatgccgcctaaaaactcgattaataaaatcaaaaacagcacttgcttcatcaggttgacgataccggaaaactgcgattgattctgatccaccatgatgagcttccgttcccgcagaccgatccgtttgcccataatgagccagacgaatgttccgagcgtcatgatgccgattccgccgaattgaagcacgaaagccaaaatgacaatcccggccgtgctgaatgtatcagccgtgttgacgaccgttaaaccggtgacactgactgagctgacagccgtaaacagcgcgtctataaacgaccagctggccccttgtttgtgggcggccggcagacttagcaaaataaatgccaccgttacagcaagaaaataatataatgcaatcagctgtgcaggcgacaagatctgtatgaatttcttcagttttaatttcataagatagttccttctgcctctcaaatgtagtacgtaattattctaatgatattgggagaatttttaaaggtctttttagaaagatttttcattaccttatgtaatttgccgatctttaaacaaaaaacctctgaaacgattgtcagaggttttgttgattattttgcttccagcctgcggatgcgctcatcgagatcagggtgtgtggagaacagtgacgaatgctttttgccgttaatttttaacgtctgcaccgccgtctggtcctcttcattcacatgtcctgtataagacttcagcgtacgcagggcgtgaatcattttatccttgccggcaaggtctgcaccgccgcggtcagcgtgaaattctctatgacgcgagtaggcgaagacgacaagactgccgagaatggaaaagataatctgaaacacgatcatcgcgataaagtgaacgaccggcgcgaggtcttctttgacaaagcggcttgcaacccatgccgcgattcgggaaaggaatacgacgaacgtattgacgattccctgcagcagcgtcatcgtgaccatatcaccgtttgtgatgtgtgcgacttcatgggcaagaaccccttccaccgcagcatcatccatctgttgcaataaacctgaagaaaccgcgacaagcgaacggcgcttagaaggcccggtcgcaaaagcattgacctccggggaatgataaatgccgacttcaggcattttcgtcatccctgcggcacgggacaatctgtgcacacggtcaaccaattgctgttcttcatagctgagcgactgtttcttcggatttaacacccggacgcccatcatcgttttggccatccatctggacattccgagagaaataaaagaaccgacaaaaccgacgacaagactgaacacgagcaatgccatcagatcaatgcgcccattttgaatatatgagccgacaccggtaacgcttgtaataatcgtaagcacaattccgattgtcgtaatgaccaaaaggttcgttaaaataaacagaaatattcttttcgccataattacctccgtcttttttaagatcaaaagaacttatttacttaaattataaatgatctgtttgaaaatgcaacaatttcgacgtatgatgttaatgtaattctcattgatattagaaagtaacacgtaatcaatcagaggtgaaccatgaacacgtttaaactgacccgaactgatatggtccggcttctttacgcgttaaaaggccaaggagacgcaacccctctccaaatcttattgcaatcagcggatatgaccttggatgaagcggaaagccgtctgcatatccctgaatttctgacgagattcgaacgaaaaaaagagaaaaaggaatacgggctttcaactaacgagattgtcgagctgggaaatctgtgcgagctgacgtctttaaaatcaaccgccgtccaaaactgggtgaagcgcgatattaaagatttaatcggccaccccttactcggcaaaaaatatacaattgaacaagctgtcatccttctcattgtacgtgatttaaaatcaatttatgacttcgaacatatacgcggcatattaaaaatcgcttttaacacgataacagacagatcagatgacgtcatcagcccgatcagctactatgaaagctgcgcccaagtgattgattatcttcatcataaggcaaacccgccgatgaaggaaacgagcctgcaggagctcgtcgaagagcagacggacaagctcaaaggctgctttaaagaactcggaaacggacaatggaacgatatcagatccataatcgccgtcacggtgctctccgttttgactttccatattcaagcctcagcctacaaaatgatcagccatttattataattcataacgcttcttcgccccggtgtctgcgccgggtttttttgctgtacaacaattgccagcataatcaataccgttccgtttgaaactaaaatgcgaaaacacatcttgccagagaaaaggagatgaaaaagatggcgagcagaaataaactcttagttccaggggctgagcaggctcttgaccaatttaaatacgaagtggctcaagaattcggcgtgaaccttagctctgatacagcagcacgcgcaaacggctctgtaggcggggaaatgacaaaacgtcttgtacagcaggctcaatcacaattaaacgggaaaaatcaataatgcagcttattcgccgggacttctcggcgaattttgatatttatcggcattctcctttccgtgccggtagccgttcggattcctccggtctgacgaatcttcatgatgccgataggattcccaatgttcattgcgatcatgattccagtaatgattgtaatacttttgcttaggctctttgtcatttccgttttcctgaggattttgtgttgggggctgctctgtttccccatcttgttccttctgtgtgttttcctctgatccggaagctgcatttttttcggtttgctgattgccgtcctgactgtccggcttcgcttcttccgtaccgggcgttgtttcattgtttcccggcttctctgctgccttttcttcatcaggagctgtcttttcatcagccgccggcttgtctgtgtccggctgctcgctttgatcagcgtctgtttcggtatctttttgatctgtttcattgccgtcggtttgcttttcaggctgtttttcttctgttttcttttcgtttcttcttatgtagctgcctgttgacatcccttcctgttttgctttttctcttgtttccatatcagattcaagcgattggacctggtaggtgcccttatatttttcagtcatgtcggccagctgttttttaacgccttttttatatgtattgtcatctgtattttcataaaccgtggaaattaaaatctcttttgattcctttacatatccatgcttgctgcaatcggtaataatattactgatgacttccttaaaatcgctgcttttccaatctccaatgtcactgatgacctgtttggcgtcatggttcagcggtgtcagttcaatgacttcatatttgctgtttaaagccatttcaatgctgggattaatgtcaagcgtcatatacgcgtaagctttgttatcagaaaaaaccgggagcaaaattaaaataaacaaaataatagcagtcatcgtaaacactcccaatttaaaagggcgcagtttcagaaaatcaaaaaagctggcccttcttcccatacgcgtttcgccttcgaacgtaatttcctctccgatttcacaagtgcggtgatcattttttgtttttaaaaattgtccgtcaggggttagcaacgtgacgaattttttatttttctctactatgatccctcttctcatgagtgcaacacccctttaagataatcttttaaataaatataatcaccggtaataataatactcatggcgatgatatattttcggttccgttcgatcgtttttctgctgaccgacacgagctgctccaactgtttgacaggaagctgttttttctggtgcaaaatggacgccagctcttcattttcaacaagcgtgtaggctaccttaatcgcattctgcctcgcatctgtatgcttcggcgattgttccagcagctctttaaaagacaggccgtattctttcagctgcttctgaaaaaaaagaatttcttcccggcgctgttcctgttctatctgtttgcggtattcatcaatggaaagctccgcttcgataaggctctgcgaagattcctggtcgtcgccttcctgcacatccatattgatatgctgagcggttcttgcttcttttctgatatagtctatcacttttctttttataatcagctctgcaaatgcaagcagcgaattacctttttcagccgaatacttttcaatggcttcgttaaaagcgatcagcccgatgctgaattcgtcgtctttttcatctatatatcgtttacaaacggatgaaaccgtcttcgcgataaaaggcttatattgctgtattaaatcgttctgcagatctttgtcgcctttttgtattttttcaacagatgtttcaagcgtttgcttcttttttcccaatttaaacaaaaggctaagcactggtttcacctcagttcctccctataactactcataatcatagctaatttagtagggattcgcaaaggaagaaaaagagaaatcgatttcatttgtctcaattatgacaagccaataagacgtactatacatgatttcgtgcccccatgcagaattaagggggttttctctgtgttttttgtaacaatgctgttataaaattgttatcatatgtcttaaatgtaagcgtttcaaacaaaaaagggaacctgctttttaaaaagccagactccctttttgatcattttacgcgtgttctcttttttccgattccgcgccagactctatttgttttgctcctgacataaaccatccgcaaaccgcaatggcagccagaaccgcccagaaaatgattttccaggccgccgaatggatgacatctgccggaatgataccgagttcctcatgggccaatgtataaagagcgagcttcacgcctacccatccgacaattacaaatgccgccgtttcaaggcccggccttgttttcagtaaggatacgaacattgatgccgcaaaacgcataatgattaaaccgattacgccgccggctaaaataacgagaaactgaccgccgtccaagccgccgatggcaggaagctgtgttcccgggagcgttacggcaagcgcgaccgccgctaaaatggagtcaacggcaaaagcgatgtccgcgagctccactttcaagacagtctgccaaaacccgctttctttctgcgttttctgaccgttgttatctttaaatacataccgcttcagcaaatggctgaccgcaatgtaaaacagatataaagcgccgacggcctggacctgccaaacattcaccagaaaagaaatggcgaacagcgacccgaaacgcaaaataaatgcgcccgccaatccgtaaaataaagccttcttcctttgtttttcaggaagatgcttcaccatcacagccatcaccagcgcgttatccgccgccaaaatcccttccagcccgattaaaacgagaagaacccatccgtactccaataataatgcaaagtccaatccattccctccgtttcttttttctatcatccgagcttataccggcggttttttacgcaaaaaagacctttgccgatata

SEQ ID NO: 35 - DNA, 62822 bp, Bacillus amyloliquefaciens
tattatagcgaaagaaagttgttgatgaaatatgaaacactatgacgtgattgtgatcggcggcggcccgtccggtttaatggctgcgattgccgcaggcgaagaaggggcggacgtattattaatcgataaaggaaacaagctgggacggaagctggcgatttccggcggcgggcgctgcaacgtgaccaaccgcctccccgttgaagaaatcatcaaacacatccccggcaacggccgctttttatacagcgcgttttccgaatttaataatgaagatattatcgccttttttgaaaaactcggcattcagctgaaagaagaagaccacgggcgcatgttcccggtgacggacaaagcgcaaagcgttgtcgatgcgcttttgaaccgattaaaacaactgaatgtcaccatccgcacaaatgaaaaaatcaaagaggtgcggtacgagaacggcaggacagcgggcattacgacaaacaatgacgaacacattaacgcagacgccgtcattatcgcggtcggcggaaaatcagtcccgcataccggcagcaccggagacggctatgcatgggcggaagcggccggtcataccgtgaccgaactctttccgacggaagtgccggttacgtcgtcagaaccgtttattaaacaaaaaacacttcaggggctgtcccttagaaacgcggccgtcagcgtcctgaataaaaaaggcaaaccaatcgtcacacacgtgatggacatgctgtttacccatttcggcttgtcaggccccgccattctccgctgcagccagttcgtcgtcaaagaactgaaaaagcagccagaggtcaaactccgcatcgatctgtttcccggcatcaacgaggaagagttatttcaaaagatgcacaaggaactgaaagacgcaccgaaaaaagcgctcaaaaacgcgctgaagccgtggatgcaggaacggtacctgctttttcttctggaacggaatggtcttgatccgcagacaagctttacggaactgccgaaggatcaattcagggcttttgtcaaagactgcaaacaatttacggttgccgctgacggaacgctttctttggacaaagcgtttgtcacaggcggaggtgtttccgtaaaagagattgagccgaaacaaatggcgtcaaaaaaaatggaaggcttatatttttgcggagaaatactcgatattcacggctataccgggggctacaatatcacttcagcctttgtcacggggcgtctcgccggtttgaatgcaggacgtttctcacgctcgctctaaatggtttaaagcgcacttacctgagcgtccccgttgataattgaccaaaaacatgatagagttttctgcgttttgtttcacctgattgagggaataggaagaaaggattgatctgcaatcgtacgaccatactaaaacaaaatggcgtattgaaaaaaatagtcagagggtgagaacgtttgaagaagaacatctccagtgttttttggattgtgattgtcatcacagccgctgcggttttatggggggccatttctcctgacagcctgcagcaagtcactgatacggcacaaaaatttattacggattctttcggctggtattatctgctggtcgtttctatatttgtcggtttctgtctctttctcattgtgagtccgatcggcacaataaaactcggaaaacccggggaaaaaccggaatttggcttattatcatggtttgccatgcttttcagcgcaggcatgggaatcggtttggtattttacggggctgcggaaccgatcagccattacgccatcagctctccctcaggtgaaacagaaacgccccaagcatttcgtgatgcgctccggtacacatttttccactgggggctgcacgcttgggccatctatgcggtcgtcgctttatgtatcgcatattttcaattcagaaaagacgcgcccggtttgatcagcagcacactgacaccgcttttgggcgataaagtaaacgggccgatcggcaaagcgattgactgtatcgcggtgtttgcgaccgttgtcggtgtggcgacaagcttagggctcggagcgactcagatcaacggcggtctgcattatttattcggcattccgaaaacattttccattcagctgatcctgatcgctgtcgtgaccgtgttatttttgatttctgcgtggagcggaatcggcaaagggattaaatacttaagcaataccaacatggcgctcgcggctattttaatgatctttatgctcattgcaggcccgacggtgctgattatgaactcatttaccgattctatcggccaatacatccaaaatatcgtgcagatgagctttcgcttgtctccgaatgatccccaaaaacgcgaatggattaacagctggaccattttctattgggcctggtggatatcctggtcgccgtttgtcggcatttttatcgcccgtgtatcaaggggccggacgatccgggaatttttaatcggggtgttggtgacaccttgtatattggctttcttatggtttgcgatcttcggtgtatccgcgatggatcttcagcagaaaggcgtattcaatgtcgcaggaatgtcaacggatacgatgctgttcggcgcactcagccactatccgctgacaatggtaacatccgtattaacgcttgttctgatcgctgtattctttattacatcagcggattcagcgacatttgtgcttggaatgcaaacgtcttacggctcattagacccgtcaaaccgggtgaaaatcatctggggcatcatccagtccgccgtggcagcggtattattatattccggcggtctggccgcactgcaaaacacggccattctcgccgcggttccgttttcagtcgtgatccttctgatgatcgtgtctctgtacaagtcattagcgagcgagagaaaaggaatcaaacaagcggagaaataccaaaaaccaagaagtccccgagtcaaaaaagcataatgcacaaagaagcccggcatttcatccgggcttctttattttcggtataaaatgagagcggaaaaacaataaagctgctcaccttcaggatcacaggccgccgctaccgtatatttaatatcaacgagctgttcatcagaaatcccctttaaaaatgtattgacttcagtctgcagatccttttcatgctcctcatcaaaaacagctatcttcagcacatcaccctctcctttctctatcaatttattccggttcaattgaaatatgatagagaaaaacagattttcttttttactgattttttactaaaagtgaccaaaaatagttgttgaaaacgcttactaacgtatgataatatcactttaacaataaccaggtcatttctatttagtaaatatttagtaaaaaggagatgcgaaatggtccgtctcaaagatattgccttacaggcatctgtatccagcgcgacagtatcgagaattttgaataaggatgactctttagccgtgactgatgaaacaagagaaaaagttctgaggatcgccgatgagctgggctatcagccgtcggcaaaaaaacggaagaaccgcagccgcagcgattcagcgcccctgatcggcgttgtcagctgcctgtcacccgaagaagaacggcaggatccttatttttcagcgatccgaaaaggcattgaggaagaatgctttcggcaaaaagtttttatcacatcttctatccatctcggttcttttcaagagcatatgtttcacgaactggacggcgttatcataatcggcagcctgcaagacgaggcgcttacgaacatcagcgccgctttcaggcacgcggtatttgttaacggcacccccgatcccgcccgctacgattccgtcagcgtggatttttatgccgcagcgcaaaaggcgatagaacatcttctgtcgctcggttaccagcggctcggttatatcggcggccgggagcgggagcataccgtcatagacggtgtaaacagcaataaaacgattgaggataagcgtctgactgctttcttacaaatggccggcgccgagccggagcatgtgctgatcggcgaatacagtatgcacgaagggttccggctgatgaatgaagccatcaaaggcggaagtctccccgatgccttttttatcgcaagtgattcgatggctgtcggcgctttaaaagccttgcaggaagccggtcttcaagtcccgcgcgatacggcggttgtcagcttcaacggaattgatgaggcagaatacgccagcacgccgttatcaacggtaaaagtatacacggaagagatgggccggacgggtgtcaaattgcttctcgaccgtttaaacggcagaaccgtcccgctggccgtgacgctccccacttcattgattgtcagacaaagctgcggctcacaagaaaggaggtgacgtgtcccgcagcgtttatatcatatttaaaggaggaaaagatgaaacgcttactggctttgtttctttcttttacttgcatgatacttcccggctgctcggcagaacagagcggcgccggagaaaagcagaaaacattgacagtctattccaccatatcctcagacagcgaacgcgccgtattcagaaagttggctgattcattccaaaaagaacatccggacattcaagtaaacgttcatttcccaggcaatgactacgaaaatatgatgagagtcagaatggcagccggtgacatgcccgaccttttcgacacacacggctgggccaaaatccgctacggagaatataccgccgacctcagcggcatgtcttggacgaagcggctcgatccgaatttaaacagcatgctcaaagacgccaaaggcagaatatacgccttccctctgaatcaggcaaaggacggactggcatacaaccgcacgctgttggaaaaatacggaatcaaaccgccggaaacaatggatgattttatgaaggcattgagacagattaaagaaaaaagcggcggaacagtcacccccttctggtttgccggctatgagaaaagctcatttgcccaatattacgatcaattcgccgcaccgcttcttatcacagatcccgcacaccgttacaaaaaacaactgttaaacggaaccttccgctggacacacttcacctatttatctgacaaactgaaagagatgcaaaaggaaaacctgctcaatatagatgccgtgacggcaaaacggtcccagctcattgaactgatggcgcaaaacaaaatcgcctttacgctgcagggcggcaccctcggccaagacgtcgctcaaatcaatccgaaggtaaaagtcggcatcataccgaccccggccgtccacaagggagacgcaccggtttggatcggaggcgaacgttacacgctggcggcattcaaggattccgcgcggcttaaagaagcgaaacagtttatcgcatttatggcccgccccgagcatgcaaaatcaattgccgaagcgacatcgcttccggccggattagtgaatgtgcaaacggacattttctacgcaaatgactataagcgctatcagcatattaaggtgcagccttattttgaccgcctttatttgccgaacggaatgtgggatgtgatgggaacagccgggcaggagctgatggccgatatcttaacccccgctgaaatttcagcgaaactcggcagggaatataagcggctccggcttcaatctgattcacagggagctgaaaaagaatgagtgatcttgcaagagaaactcaaggatctcaacatcaaaagccggtaaaatccgcgtcactatggtggatgtacgttcccgctcttgccatagtttttattttcatgatttttccgtttgtcaaaggcgcttttatcacatttacaaactggaacggcttctcacagacgtatcaatgggtgggggtcactcaatataaaaggctttttacagatccggacacgtggcttattgtgaaaaacactttgctttacggcatcggaagcactttttttcagaatatgctcggacttttatatgcgctgcttttgaatcagagctcaaaaatgaaggcgctcacaagaacgatcgtctacctgcccgtcattatcagtccgctgataatgggatacatttggtattttattttctcatatgacgggggtgcgctgaatgatgtacttggcgcactgggaatcggtcctgtcaacgccttggcaagccctgcggcaaacccgtggattatcgtgatgattaacacgtatcaatacgcaggcattgcgatgattgtatatttggcggggctgcaaagcattccgaaagattattacgaggccgcaaaaatagatggcgcgggaggtcttcagccgtttttcaccatcaccctgcctttattgatgccggctgtcaccatcaacatggtcatcaatatcatcggcgggctgaagctgtttgatgtcattttcgcactgaccgcaggcgggccgggcaattcctctcaatcgatgtcgacgtttatgtatgatttatattttaaacggcaggatgcgggatatgccgccgcccaaggcgtatttatgtccgttattattcttgtcatcagcttttcggctctcgtgtatttcaagcgaaaggagacagaaatgtcatgaaaacagcccgaatgcggatttttacgctgttggcagccgttatctcgtgcgttcatattgtccccttttatattttgctgaccacgtcattaaaagcaaaaggagactacagttcaaaatggtcgctgccatccgccttttcatttcagaattttcgtgaagcatgggaacgtgcctctctcgggcaatcctttctgaacacgatcatcattacagccgtttccgccgctttgttaattttcatgggttcgcttgccgcataccctctcgcaagaagaaatacaaagctgaacaaaatcgtcttcggccttttgatttcaatcatgatcatcccgcctttgacttccatggttcctttatacaagatggtcgctgatgcggggctgatcaatacgcatgccgcagccattctcattaatacggctgcatatatgccgctgaccgttttcttatattcagggtttatccgctcttccattccgaaagagcttgaggaagccgccaggatggacggcgcgggattgatcaggactttttatacaatcgtgtttcctttgttgaaaccgattaccgcaacggtctgcattatttcctgcgtgtttatctggaacgattaccaatttgcgattttctttttacaagatcaaaaggtgcagacattgaccgtggccatggcgggattcttcggcgaaaacgcgaacaatcttcacttagtcgccgcagccgcaattatggcgatgctgccgatggtcgtattgtttttggcgcttcaaaaatattttatctcagggctgtcctccggggcggtcaaaggctgagaagaaaagggaggaatttctattgaagaaaattacgtttatcggagcggggagcacgattttcgcaaaaaatgtactgggggactgcttactgactgaagcattaaacgggtttgaattcgcgctttatgatattgacgctgtacggctgaaagaatcccagctcatgctggaaaacatgagagaccgctacaatacgagtatatccatcatctcctacgatgaccgaaaacaggcgctgaaacacgccggctatgtgatcaacgccattcaagtcggcggctataaacccgcgacggttattgactttgacatcccgaagcggtacggtctccgccagacgattgccgataccgtcggaataggcggcattttccgttcccttcgcaccatccccgttttatttgacatcgcaaaagacatggaagaggtctgcccggatgcgtggctgttaaactatacaaatccgatggcctctctgaccggagcgatgctcagacatacaaatgtcaaaacggtcggcctgtgccacagcgtccaggtatgtaccaaagatctgtttgactcactcggcatggatcacgaagggacagaagaacgcattgccggcatcaaccatatggcttggcttttggagattaaaaaagacggaattgatttatatcctgaaattaaaagacgggcacgcgaaaaacaaaagacgaaacataaggacatggtgcggtttgagctgatggataaattcggctgctacgtaacggaatcatctgagcataatgctgaatatcacccgtattttataaaaagccggtatcctgagctgatagatgaactccaaattccgcttgatgaatatccgaggagatgcgcggaacaaatcaacaattgggaaacgatgagagacggcatcatcaacaaccaaaacctgacgcacgaacgctcaaaagaatacggttcgagaattatagaagcgatggagacgggcaaaccgttcacattcggcggcaatgtgctgaataccgggctgataccgaatctgccggcgaaagcggtcgttgaagtgccttgcacagccgtcaaaaaccacattatgtcgtgctattccggcgaacttccggagcagctcgcggcgctcaacagaacaaacattaacacacagcttttaaccatcgaagcggccgttacattaaaaaaggaagccgtatatcaggcggccatgcttgacccgcatacaagcgccgagctttccatgaatgacatcatctctttgtgcgacgacttatttgaagcgcacaaagacctgcttccggcttatcactgatcattcgcgatccggtcctggaaaggctggatcgctttatatgttcagcaccagtttgaccgtctgtaaagtgtgtcctttaaagtcttcttcaaattcacatacccattgaaaccctttcgcttgataaaaggataaggcgatgcggttctctttttctgcatggacataaagcttttttaccccgccggactgcctgatgcattctttaaggagtgtcgttcctatcccgcttccctggcaatccgggtcaatatagatggcggtcagctccgcatttccgtctttttgaaccggggtgacatttgcaaaaccgagcactcgcccctcttcttctgccacaaagaacagagaatgcaagagccggcgttccatcatctcatcctgataggcggattcgagaaactgatcctgaatgtgtccgggaataatcccttcatacgtatgatgccagctgcgttctgcgacttgccggacctgtttgatatcgtttgttttcatcgcgcggatcatcggtttcacctgattcgcctcccgtttttttataaaaaaagaagaaaaagacgcacgtcctttttcttctttcacttcaaagcgttatttcttcggctttgtttcgccttcccactccagcatgccgccttcaacattaaccgtacggaagccctgctcatgtaaatacatacaaacgttcatacttctttttccggaacggcagataaatacatattccttgtccttgtctaacgcatccatcttctcagggatgtctcccatgcggatgtgaacggcctgcggaatcattccttcggcaacttcttcgtcttctctgacatcaaccagatacagctcttctcccgtttttaatttttcttccagtgcggctgtgctgatttcatttattttcaatgtgtgacactcccattcatctttatggtgttaagtataccaaagcccgcggtgcaatttctatgatagaggcctgataaaaaagcccctctctgtaggagaggggcttcgtccggtcagtttgccacgatattgacaagcttgcccggtacggcaatgatttttcggatcgtttttccttcaagctgctcttttactttttcgtcagcttgtgcgagctgttctaacgctgctttatcagcatcagccggaaccattaatttcgcttttacttttccgttcagctggacgacgatttccacttcatcgtccaccagttttgattcgtcataagcaggccaagcctcgtatgcaatcgaaccttcgtggccgagtttttcccacagttcttcagccaaatgcggcgcaataggagaaagcagcttcacaaaaccttcgatatagtctttcggcagttcattcgctttgtaagcttcattaatgaagaccatcagctgagaaatgcccgtgttaaaacgaagggcttcgaagttttctgtcactttcatgaccgtttcatgatagacgcgctcaagagtttcgcctgcgccttctgtcactttgcccgtcagttcgccgttttcctcgataaacaaacgccatacgcggtcaaggaagcggcgcgctccgtcaagacctgattcagaccaggcgatagatgcatcaagcggccccataaacatttcgtacaggcggagcgtatctgctccgtgagacgccacaatttcatccggattgacgacgtttccgcgggatttactcattttttcattattttccccgagaatcattccttggttatacagcttttggaacggttctttcgtcggcacgacaccgatgtcgtagaggaatttatgccagaaacgcgcgtacagaaggtgaagcacggcatgctccgctcctccgatgtaaatatcaacaggcagccatttatccagtttctcaggtgacgcgagctgatccggatttttcggatcgataaagcggaggaaataccagcagcttcccgcccattgcggcatcgtgtttgtttctcttctgccttttttgcccgtttcaggatcagtgacttccacccactctttaatgttggcaagcggtgattcacctgttccgctcggtttgatttcatctgttttcggcagaatcagcggcagctcttccgccggaacggctgttgacgtgccgtcttcccaatgaataaccggaatcggctcgccccaatagcgctggcggctgaacagccaatcacgcagacggtatgtcacttttttctcaccgtttttcgtttcttcaagccaggcgatcattttttcaatcgcttccgctttattcagtccgttcagaaagccggaattgacatgctctccgtctcccgtgtacgcttcttcttccgtgtttccgccttttacgacttctttgacaggcaggctgaacactttggcgaattcaaaatcacgttcgtcatgcgccggcacggccattacagcgcccgttccgtaagaggcgaggacataatccgctatccagatcggcagcttttctccgtttgcagggtttacggcatatgcgcctgtgaagacgcccgtttttgttttcgcaagatccgtccgttccagatcacttttcgcctgaacttctttaacataagcgtctaccgcttctttttgttcaggcgtcgtgatggcctccacaagctcatgctcaggagccagtacggcataagccgcgccgaacagcgtgtccggtcttgtcgtaaacaccgtaaacgtgtcatcagtgccgtcgatcgcgaaatgcacgtttgcgccttctgagcgtccgatccagttgcgctgcatgtctttaatgctttccggccagtcaagttcttctaaatcttcaagaagcctgtccgcataagcggtgattttcagcatccattgtctcatcggacggcgttcaaccggatggccgccccgctcgcttttgccgtcaatgacttcttcgttcgcaagcaccgttccgagcgccgggcaccagttgaccggcacttcgtctacgtaagcgagccctttttcgtacagcttggtgaagatccactgcgtccacttgtaatagtccggatcagtcgtattgatttcacgatcccaatcgtaagaaaatccgagtgattggatctggcggcggaaattatctatattttgttttgtgaactcagccggatcattccccgtgtcaagcgcgtattgctcggcaggaagcccgaacgcgtcccatcccatcggatgaagcacattgtatccttgcatgcgtctcatgcgcgaaaggatatcggttgccgtatagccttccggatgtccgacatgaaggccggctcctgaaggatacgggaacatgtcaagcgcgtaaaacttcggcttgtcattctcttcactgacggcgaacgttttatgatccaaccagtaattctgccatttcttttctattttttcgtgctgaaaactcaacgtaaaaacctccttctgattgaatacggcgtatgtagtccaagtattgacgggatgagaaagattatattcagattattctaaaactaaaaaaaactccctcatcccaaaaagggacgagagatttttatttcccgcggtaccaccctcgttagcgcggttttaagccgcactcacttgatacttttaacgcagttatgcgtcagcggttttgccgctgcaactctgaggcgagttcggaaacagacttgattgacttgcaccggccgtcaactctctgattgcaaaatctgcttcttactgctcctcttcactgttcttatcgctaccgtaatcttacctgtattttatagaattctgttcataagtgcaagcaggtttgtatacaatgggaatgtacccagaacgggtcatgagcggggatattattttgatggaggatttttttgctggtgtggttttgcttcggccgaatcactgttttgttctctgacaaaatcaaagctcctgagaacagcttctccgccgtagcctgcgattatggataagatgacgagttgaattcctgaatcggggtcagcggataagacaagtaagatggaagcagccattccgataaaaccatcttccaaaaaaccgagatagataaaccgctttgtcattctgggtttctccagcctgcctctctttttcacatgaccgagaacccccatgatgcctccaattacacaagcaattattacctgatgcagcatcttcatcaccttcctaaagcccttatttagtaaagcgacttcaggccatccagcccccttacgaatacgatgatattcgatatctacataccggcgattgagcaggaaagtaaaaagcttgtttcttccattatatgtgaacacatgatcggtaagcttgatgcattagattcatttttcacccagtgacaatgacctagtcacttacttagcaatgtgtgccttccccttatatattcagtgtatatgaggacaagcccgaatgacaaattgcaaacttcggctgcttgaatcagaacatatgttatgctacggttactgtagattcatttaaaaaggggagaaacaacggctgaaaaagcgcacagctttacggccaaaagggggttttacatggctgactcaaatgtattcggaaaactggagcagctggagcttatcaaaaaggcgcttgatcacgcacgcatcggcgtggtgattacagacccctctcttgaggacaatcccatcatatatacaaatcagggatttatggatatgacaggctactcttccgaagagatattaggtaagaactgcagatttctgcaaagcaaagaaaccgaccgtcaacaagtcgcgaaaataagaaagagcttaaaccagaaagaaaagatcacggtgcggctgaaaaatgtcaaaaaagacggcaccccattttggaatgaactcaacattgatcctctgtatgttgaagacaagctctattttgtcggttttcaaaaagacattacagagcagaaagaatacgaaaagctccttgaggattccctcgcagaaatcacgacgctgtcaacgccgattgttccgatccgaaacggcatctccgctttgccgttagtgggaaacttaacggaagaacgatttgattcaatcgtgacaactttgacggacatattaaccgcatctaaagatgattacttaattatagacttatcaggtctggccgaggtaaacgaacagaccgcagaccggattttcaaattgcaccatctgcttaaattaatcggcacggaattgattattaccgggatcaagccttccctcgccatgagaataaatcagcttgatgccagcttttcttcattaaagacatatttaaacgttaaggacgcggtcaacgtgcttccggtcgtataaacaaaaaaatcccgccgaaacagcgggatttttttatgtcgtcatcgcacttggacgttttgtttattaacggttttcaggcgtttgtcgtacagcaccgtcgctgcgatgctgacaacaagaagcaccatcaggatcagcagcagcacgctcatgccgtactgatcaaccagcacgccgccaaggagcggcccgatcattctgccgcccgtcgccgcactgttgacgaacccttggtaaaacccctctttccccttaggcgcaagctgattggcaatggtaggcacggcaggccagacaagcatttctccgacagttaaaatcaccattgcggtgaggtacatcggaaattgcttggcgctgagaagcacgccgaacgagacgataaaaatacaaaagccgatgaccatctgcgtttttaacgcaccggaccattttctcagaacagctcctatgagaggctgtccggcgacaattaatattccgtttacggtccaaagcacactgtataatgaaagcggcataccgatgctttgagtatgtgacgcaacggttgtggaccactgcgaataggcaatccacccgagaacatacccgccgctcaatatgagaagcgccgtaaatttcgttctgctgctgacaggctcgtagtccaggacagaaacctggctcgcatttccggttttgatatttcgaaacccgaaaaatacgataaggaaaaacagcacatacagcatagcattggctaaaaacacgtacgtaaacgagtacgccgcaaccatcccgccgagtgccgagcccacggcgacacctgcgttctgagctacataaatcgcattaaaagctctccgcccgccttctttccataccgctcccgccatggcataactggccggaaacacgataccggaaccgaagccgacaatgatgagcagccaaatataaacgggccattggtgaaacagaacgagtccgagaagacttgccaatgtgatcataatgccgagcataatggatttgaatccgccgattttatcaaacaaaaatccgccgcataaattccccgccacactggcaccggaattcagcatcagaacaatccccgcaacagtcagcgatttccctaaatgattatgaatatagatcgtattcagcggccacaaaaaagatgcgcccgtcacattgataaacattccgatgattaatatcttcaaagcgcgcggcataccgatccccctctctctataaaaaaccccatgaaaaaacggaaaccgcaagccgcggctccgtatcgaacacgttatcatagcacattcattctatcgccgcggacgtcttttttcaacatcagaatccgaaaaaaataatgccggaatgttgaaaaaattacaaatgattggattcacaaaaacaggccggcctcatgctcttttcctcagcagccaaaacggaatatacagaatgaaaaagctcaatatcaccgccgcttccattgatagaagataccacggccaaggtccgaaaacattcagaagcgaagcggtcttcggttttttcattaaatataggtaatttgcattcagcacacgatcaataaaaaagacacacgccccgtacagatttacgatcagcaccgatacccacagcccgcgcgccgacggcctgtacctttctgaagcagccatgaatagacaggtaagaaaaacacagccgtgggagacgaaaaacacgatgtaccgaaaatgagggaaagaatacgcccctaaatcaggtgttgccatcgcctgtatagcgctgcccaaaccggcaaaatagaggaaggcgaacagttttttgctttttgtcatgaccatcagcatcgccaaatagacggaaaggtcgctcagctgcagcggcagagctgttttcagcgaccaggcatgatgacatagcagccatatatgatagctgatctgcgacacggcaaggagaatgaacagtacatagcggatcatgcgattcgaccggccgtggttgagctttttccggaacatgatcacgcccgcccccagcaatccgatgatcaacagcgtgaaaatgtgttccttggaaaaaagatgaaaggtccctgtttcagatttcaattgaaaatacttctgcataaggctcccccgcgcgaaaaaatgacgtatgtctattcttttaaaaatcgctttcttctattcatacaaaaaaagcctccgcttatgcggaggctcctcaacttgttttacaatgcggattgaatgacctttttatagtatagcaccgacagcatgccgaagatggagtacagcagcgtatacagcgccatgacgatgatcatcggcgtccacacttccgttccgaataaaaaccatcctgactgaacggcaaaatagctgtggaacagccctagaacgagcggaatcccgaaatgatacgcctgcttccggcggatgcctttcagcagatctcccgttgtgaagccgagcttccgcaatatcgtgtaatcagccttctcatcctcacactcgcccatttgtttaaaataaaggatacagcctgaggtgatcagaaaggtcaatcccaaaaagccgacaataaacatgatcagccccatatttttcttttgagtgtcagccgtttcaaattgcgaaagcgcgccgtctgaatagtgctgcgcctgaaacagaccatcagctttttggatgtcctcttcacgtttgagtgtaatgccgaaaaaccgatttgattttccctgaatggacgggtcgatatctttctcgatccggtcgaatacctgctgcgtgacgataacggtcggcagccctccgcttgtaaatgtatatgacaggaggaagtcgttcttcaagcccttatacgccagcggtattttatccgttttgccgtttatatcaatggaacccgacgttttcaggtcgagaaatcttttcatcatatcattatatccggtaaacacggcttctccgtcagaaagctccgtcccttctgcgtctttctcgcttataatcggcagcgccaagctggacgggtcttgttgaaagtttttcatatcgccgtttatgatgttcttcatattgacaccggcttgaatggtcttgattgttttcactttgtgttcaattccgtctttcttcaataaagcggtaaatgagtcagtctccttttggttatcaaacgcaaagtccgcggctgtattttgctcagccgatttttccgcggagtagtacgagatatagcttaaagacagcaaaccgattgccagcgccgaaagagtcgtaataatcgtcagcaatacggcgtttgacttcatccggaacatgatggatgacaaagacagcacttcactgacattcagatacccgccttttgatttccggatgagatttgccagaaagctgaccgaacctttataaaacagataggttccgataatgaccgagccgagaataaacaccattgccgaaaacagttcattcatgctcgtaaaactgcctccgaataaatgcgcggacacggcatagccggcgataatggccgcaataccgacaacgccgatcgacatctgcacccaagaaagccgtcttatgccgctttctgacgatgacgcggttttaaataaagacaaaatgctttgccgtttaataaataagtaattcatcaccataatcagcaggtaaattgccccgaacacaattaacgtctgaacgagcgccttgcttgaaaaaaacagtgagacagaggctttcacaccgactgtatgaaacagcatcatcatacataatttcgaaagagaaaagccggcaaaaataccgatccaaatcgatccgaaatacaaaatgaaattttctgtgctgagtatgcggaaaatgtgcattttcgtcatgccgattaatcggaataagccgatttcccggccgcgccgtttaataaaaatggtgttggcgtataaaagaaataccgacacgatcgccacaagcagtacagaggcggcccggattgccgccgctccttttatggagcttttcatttcatcaagcgccggatcgtattgcatcgtgacaaacgcgaaataaagggcggcgctgaacaccagcgcaaaaacgtaaaggtaatagtttttcatattctttttcaggttctggaagatcaaatgatgaatactcatgcctgaaccccgcccaatacactttgcgttttcataatatcctgaaaaaagtccggtctgtcctgaccgcctttattcagctgtgtatacacacggccgtctttaatgaaaaccacacgtccggaatagctggcggcaaccggatcatgcgtcaccatcacaatggtggcgcggcgtttttgattcagacggctgagtttattcagtaaatccatggcagcctttgaatcgagcgctccggtcggctcatcagcaaaaataatgcccggttcgtgaataacagctcttgcggcagacgtccgctgtttttgcccgccggaaatttcactcggatacttatgtcgcaaatcatagatcccaagctcctctgccgtctcggcaaatcgcaggtccgcctctttcttagacattttcgtaatggataacggcaggagtatgttttccttcacggtcagcgtgtccaataaattataatcctgaaaaataaagccgagatgccgttttctgaattcggcaagctgtttttctttcatggatgttatctccgtctcattcagtttaatggtgcccgcgctcactttatcaatggaggaaagcacattcaaaagggtcgttttccctgatcccgacgggcccataatgctgacgaattcccctttgtgaatctgaagatcaattcctttcagcacctcttgtttattcagcttgtttccgtagcttttttgtatattgcctgcttctaaaatcatcgcgttatgattctccttttacattggttatctttattttaaaaacagaagccgtttttttcgtttgattaagcgaacaaaagagaaaagcatgtgacacttttgtcacacgctgaacatgctgacggcatcgttctgtttcggaaacaccaaggtaaaaaccgtgccgctttccggctcagagcgcacgctgatctgtatgagaagcggagccgcggcttttcgagccaaatacaggcccatccccgttgacgcgtgatcacgcctcattcgcgtcgaagtaaatcccttttcaaaaatgcgcggaagatctttgggctcgatgccgatgccgcggtcttcaatatccacgtgcacccggccgttttgttcatagctttttacggtaatgtcatccgcttcactgtatttgacggcattgcttaacagctgcctgatgatgaaggaaagccattttccgtcactgtgaacgtctggtgaatcaagctgaatgtcaaacccgatccctttttgtatacaccatgattgcagatttttaatttctttgaaaacgagcggtctgagctgaacgcgctggaatgataaatcattttcaataaaggacaatcgtttctgatgaagctgctggtccaggagatggtgaatccgcagccattcatacagcaaaggggctttcagcggctgttcatcaaggcgctcaatcatgagatgcatcgctgtcagcggtgttttgacctcgtgaatccatgacatcagatcgtccttttcatgctctgaagccgcctgaaggtgaagtgagctttttcgtaattgctccgtctgcccttcaatgctttcttcaacgatagactcaaacggactgtcaggcgctttaagataagacatgtctaaattggcgtcccactctcttaagcttttataataggcggtctctttacgatagcggaacaagagaaatacaagaaacacaagaagcgacaggtaaacgaaatacagcactgaaaaaaacggaatagacggatcaatatatgccgcaaaaaggagcacagcctgctgcaaaagaaacatcgcaatccagctttttctttcgagcagaaatgatttaatcataaagaccgtcttcttcctttgcgatgtatccctgccccaccttggtttcaatcattttcccgatgcctaattgttcgagttttttccgcagccggttgacattcaccgtcagcgtattatcactgacgaaacgttcatcattccaaaggcttctgatgagttcttcccgactgacgattttatttttctgctcagccagcagttttaagatcagcatttcgtttttggtcagctcgaccgaaccgtttttacggctgaccgtgttggtttctgtgtcaatgaccgccccgcaccatcttttcatcagcgccggttctgtgccgtattgatgcacacggcggaacaccgcctgtattttcgcgattaacacatcaaagtgaaaaggcttctgaataaaatcatctgccccgagctgcatcgacatgaccatatccgcgggatgatcacgcgaggacaaaaagagaatcggcacgtttgattgggagcgtatcattctgcaccaatgaaagccgtcaaatttcggcagctgtacatcaatgatcaccaaatcaggcttgatttcggaaaactcccggatgacccggctgaaatcttttattccgtgcaccgcaaatgaccagcccgttaatctctctttcatctcgtgaaacaaagtgttatcatcttctattaacaaaatgtgaaacatggtatccgcccttttctgataaatagaggaaaaaccggctgatgtccagccggcttttttcctttacagttctcttcttaatgcggtcagaacgttggtttttgtcgctttgcgggccggattcataccggaaatcaccgcgacccccgcacaaatgacaactgcgatcacaacgaggctgagcgggatataggagaaggtataatgaagatcttcagctccggtgtttccccctaccgcttttaagataaccggcacagccagattgacggcaaaactcactccgtaagaaatgataatcccgatgacagaacctaatatcccgatataggcgctttccatcaggaacattctgcggatgatggacgggcttgcgccgatcgctttcataatcccgatttcctgcgttcgttccgtcaccgccatcgtcatcgtattgaaaataccgatagcagaaatcacgacggcgataaagccgacaaagatcaggccgattttaaagacgaggaaaaaggtgttgacgcccttcagctcggtagtgacagacctgacataaaagccgtcatccgtgaggtcatgggtaagctgatcgacatgatcgaatttgtccgcatacacattgatgcttttttccgcatttccattcttcagatccaagaatgtcgagaagtctttcttgaattgatcactcacaaaaatatttgtatcctccatccaatcttgggacggtttttttgtaattccaactactttaaagtcgtacgttttcgttttttcaacgtctccgtctttgtttgttttggagatgctcagctgtatcgttttattaagcaggtctttcgtatagccttttggttttttcacctccgacatgtcgccttggtgatcctttaactctttgtcgtaagcgtcagcctcttttttcgtcaataggttcttcgcaaaatcatagccgaccacgatttcattctctgtgcgggcgacccttccctgatcaagctccatattggctttgacttcatcgttcatgtttgtcagcacaatggctgaatcttcatttgttcggtttcccaatgacgctttattcggttcatacacttgtgttctttcaacgacagacttgacatttttatacttttccaagtctgatttcttcacggcttttccgttttcttggccgagtacgttgatttccgtaacaatctgctggctcatcgtaatgtctgtaatcgttttttggatgccgaatccgacggaagccagcaccactaaaaacgcgcacgccattgtcgttgccagcaccgtcatgaaaacacgcagccggtttttcttcatatttcttctgataaagtgaatctgatccttaaatctcaacagtaacgcccccttttaatacaccgtcatgcagctggaattttgaatgcgcgatcgaagcgacttcatcgtcatgcgtaatgatgacaaatgtaatcccgcgctcccggttcagctgctgaattaatgcaagcacctcaagttccgtctctgaatcaaggcttcccgtcggctcatcagctaaaataatcgacggatttaaaatcagggctcttgcgatactgacacgctgctgctggccgcctgacagctcattcggataatgattcgcatgattctcaagtccgacccgtttcagcatatccgcgaccttctgcttgcgttcagacggtttgacgccttttaaggcaagcggcatttcaacattttcataggttgtcagactcggaatgagctgaaaactttgaaaaataaagccgaaatgcccgaggcggaactgcgcccactctttttcactgaagcccgtcacatcagtgccgttaatgacgatacggcccttcgtcggcgctatgtatccggatattaaattcagaagcgttgattttccggaaccgctccgaccgacgatacaggcaatttcccctttttcaacggtcaaagagacatccttcaataccggaacttcactctctctgcctttcctgccgattttaaatgaatgatcaatatgctgtacttctatcacgtacaccactcccccttatatctgtttcgtttttttatagatgaagtaataactgatgaaaaacccgataatcgcaccgagaagcatgccgaatatgtaaccggtatacgagccgttataagcatatccgcatacccccgcacttcccagcatactgagcaccatgacgagcacttgaatgatgcgctcaatgtgtttgctcaggataaaatgaccgcttcgttcactcggcattttcaggaaattcgcatagccgaatagatagaaacaaaatcccattaatgcggagattaacaatgcgtgtttcatgtaatacatccatgatgtatggatgtaagcggcaggcatgaaatagatcagaaacccgctccaagggaaatcaatatccggcacagcctgcctgccaaaaaggaactcagcgtttaacaggtaaatcgtcataaccacgatcggaaagacggaaaccgtaaacgccgtgatcagatgtgccgctaaattgcccgttatcgtgccggcagctgtcactaatgcataaatcatcaagctgatgaccagcatccctgcgctgaatgattgaaaatgatggacagcgtcaggtttaagcgccagaaacaatatgtcagatactccgtaagaaacaaattgcgagccggctaacacggctgctcccaagaaaaacttcgtatgaaatatccggcttctcgaatacggaagactcagtgtaaacatcctttcagcccggcctcctcttatcagaaaaagccccatcataaccggaggaatgaaatgcagcccgatcaaattccgattgctgtaatcaatgctgaacgtacaaactgaatctgaatattgatgaagcgcactcaaacaatccttatagtgaaaatattcatttataattgccaaagggcctaaaatagctaagaaccccgctgtaagaagcagcagcgtctgccgctgcttccattctttataaagcaaaccgctaatcggcaccttgctttcctccaaactgttcattttcaaacagatctacatatgctttgacttcctgtaaaccgtaaaataactgatgaaaaacccgataatcgcgccgaagataatgccggctaaatagccgaacatcgtgtctgtgaccccatatccgaaaacgccgaaacccataacggcaaaggcaatcaccaatatctgcaccggccggtccaattttctccaaagaaagaatctgccgttccgttcattcgggtgtttcagaaagctgacgtaaccgatcagataaaagacaaggctcatcacaatcggaatgattaaaatcaaatctctttctctgatccagtcgttaaacacatatacaataggggttataaatataaaaagacgggattcgatataactgctgataaaagaaaattgatctccgacactaaaatcgaaaacgacctccaaattcgcggccggcagaccgatgagtaaaaagggcagaaccgttactgtaaacgccgttaacagctgggcgaatatctgtcccgttaatgctccggatgccattaacaaggcgtaagccataaaactgatgacaatcattccgattgaaaaatgatcaaaatcgtacgtatggctcggtttcagcaaagatatcagcaatgacgccgctccatagcctatcacctgaggaacaacaatgactgccccgccgagccagaatttcgtctgaaagatttggcctctgctgtaaggcatgcttaacaaagcatccatcgttccctttgtccgttctaaccctaataagaagacagcaatgataacactcacaatccagctgaaggaaagaagcgacccattcgtataattaacaacgaattcacaatcttgaagagctgggttattcaaacattcttgatatgttgagtagttgttataaaccataaaagggtttgccgccattaaaagaatgccgctgcataaaaacaaccactgatttttcttccattctgtgtacaacaatccccgcggtatcattccggccctcctttcttatacatgcttcgtttttttaaatatggcaaagtaactgaccaaaaatccgatcgctcctccgaccagcatcccggccacataccctgtcatcgtctgtcccatcgagtaccccgccaggccaaaaccgagaacggcgattaagatcaccacaatctgaatgggccggtcaagctgtctccagagaaaaaaacggccgttccgttccaccggctgcctgacatagcaaaagtacccgatggcataaaatacaatgctcatcactgccggaatgattaatatatacttgctggcagatacccagtccgtattaacatacatgatcggaatcagatattgaaacgaatcgtttaagtaagcattgactgatggcatcagctcatgcatgccgaccccgaagataacttccgcatttgtcagcggcagcgtaataatcaggtaaggcgctatcgacacggcaaacgccgttaacagctgggcgaacgtattgcccgttaagcagcctgcgctcgcgaccaatgtaaaagccaaaatactcacaatgatttcgccgacgctgtaatggtgaaagaaatatacgcgctcaggctttaacagaagaatgagcagctcagccagcccgtagccgatcacctgagcgccggtaatgaccgccgccccgagccaaaatttggtgtgaaacacctgagcgcgggaataaggcagactgaacagcgcatcaatcgttccttttgtacgctccagtccgaataagcaaaccgccaaaatcacagcgggcgcccagttcaagttcagcattccgctatccaaagaattcacataaaacttacaatatgctccgtgggtatccagacagccctgatagacaagataggtatttaacacttcaaatggattgaccgccgctaaaaaaatgccgaccatcacaagaacagttcgattctgcacccattccctgtacagcaatcccctgtctaccatctccggttccctccaaacttcgcgatgaagacttcttctaagttgacaggaagttcgttccatactttcggctgcagctcttgcagaaagttctttttcttttcatcattcttttgaatcagcaccgtataaaacacaccggcatggtcgagaatcggtatattttgttctctgatcttcaaggcgacgttttcttcaaatgccatttggattttcatgtactcttccttcatatcatccaagtccatcacattcgtcagctgatttccttccaaaaacccgatccggttgcacattcgctcaatatcttctaaacggtgtgaggtaatcagaatgctcgtttcccgttcagccacttcatccaccataagctgaagcacatcatgacgcgttacggcgtcaattccgtccgtcggttcatccaaaaggataagtgccgggcgtgaagcaaaggcaaggacgagcgcaagctgttttttcaggcctgtcgataattcacggtatttcttcgtttccggaatgccgtacctgttcatcagctcattggcgtaagtcacatcaaaattcggatagattctgcttacaatcgcaacaagctgtttatatgtatacttgtcataaaaaggattttcaacaggcatataaatgatgttctgttttactttcggatgccgctttatttccacctgattaaataaaaccgtcccttgatccggcagcagaatctgctgaatgagccggagcagtgttgttttccctgatccgtttcgcccgagcagcccgaaaatttccccttttccgatggtgagcgaaatatccttgagcacttctttaccgtctatcgtttttgagagattccgcaattcaatcatgatccttgcctcctttcacatcagcgctgatttcctttatccattcctgcagcttctccagctcaactcccgcgtaatgggcatcgatgatgagctgtttcaattgctcttttatcatcgtcatcttcccttcaaccaatgtcgtttttgcattctccgatatatacgttcctcttcccctcagcgtttcaatgacaccatcgcgttcgagctccttgtacgctttgctgactgtgttcggattggcgataatgatcgttgccaattccctgacagaaggaagtttatcccccggcttcatgatcccttttaaacaaagctctttcagttgctgtatgatctgctcataaatcggagttgagcttctcggatcgatttgaatcatttacttcccttctttcttttacgagctgctctctttcttcaaatgttctgccattgaaatccgagtacgacaagaacggcaaacagactgctggccaaaaccgaggcggcgataataagaggcacatcttgttttacggatcttttgtttttcatgaaagttccccttccctatgcttaacatttatatatcgatttcattttttgagtgttttatgtgtattacatcaagtagtacacgtaatacaataaacacactcaggcctattgtcaattctttttttaaaagaaatacaaaaaaacccgccgggattccggcaggtttgctgaaccatttgaaacggcgcggtcagtaatcaaaattacgctgcaaaatcatattgttttgcaaggtctgcagctgcaatctcattcggtaaagctgctctctttgctgatcattcgcagataatgacagcttgtttaattcattcaccgcgttttcaagcatcatttgcgcttcactgtactcattatcattataatgctcttgttttgaagcggttataaattgctcattcgcaaattcatacgcctgttcgcttctttggagatgttcatctactgattgtcttgttgccaacgaaacccctcctcagtgaatgggaaatcaaacttagtttgagcggaccaaaaataataacacccgaaggttgaaggaaagagaaccaaattttccgtgtttaactaaaggaatgagaatcctgcctgcagtcataataaacaaaagaaagccgcatcctgttttcagattgtgaacccccatcattcatgctacaattttaggatgcatctgatgtgagggaggctttttgaacattgaacgagaataacccttttccttattcaaatacggaaaaacggtaccatacattaaattatcatctgcgggagcatttcgggcataaagtgtttaaagtcgcgcttgacggcggttttgactgcccgaatcgggacggcacggttgcacacggaggctgcacattctgcagcgcggcgggctccggcgattttgccggcaatcgggccgatgacttactcacgcaatttcacgatatcaaaaaccgcatgcacgaaaagtggaaagacggcaaatatatcgcatatttccaagcgttcacgaatacgcatgccccggtagaggagctgcgtgaaaaattcgaatccgtcctcaagcttgacggcgttgtcggcatgtcgatcgcgacccgtccggactgcctgccggacgatgtcgtggaatatttggccgaactgaatgagcggacctatttgtgggttgaactcgggctgcagaccgtgcatgagcggaccgcccttctgatcaaccgcgcccatgattttgactgctatgttgagggtgtcaataaactgagaaaacacggcatccgcgtttgttcccatatcattaacgggcttccgcttgaaaacagggacatgatgatggagacggccaaagccgtcgctgatttggatgtacaaggcattaaaattcacctgcttcacttattaaaaggcacaccgatggtgaagcaatatgaaaaaggaaagctggagttcctttctcaagaagaatatgtaagtcttgtatgtgatcagctcgaaatcattcccccggaaatgatcgttcaccgcattacgggagacgggccgatcgaattaatggtcggaccgatgtggagcgtcaataagtgggaagtactgggcgccattcaaaaagagctggaaacacggggaagctatcaagggaagctcttcagaaagatcggggaggagaccgccctatgaccttaatgcacatcctccctttcagtaaagaattgctgaagtccgccgcacaggaaggtgatatcacagttgacgcgacgatgggcaacggacatgatacatatttcctggccggccttgtcggtgagacaggacatgtccatgcctttgatattcaagcggacgcactggctaaaacgaaggagcggctcggtgccgacttcggcccgcgcgtcacgcttcaccataagagccatgatcaaataaaggcatcgctgcctgaagatgcgcacggtcgtgtggcttgcgccgtgtttaatctcggctatctgcccggcggcgataaaagcattacgacaaacggtcactcaaccatttccgcgatcgaacagctccttgaactgctgaaggagaacgggctgatcgttctcgttgtgtaccacgggcatcctgaaggcaagacggaaaaaagtgcattactggagtactgcggcaatcttgatcaggaaaaagcgcgcgtgctgagctacggctttctcaatcagcgaaacgaccctccgtttattatagcgattgaaaagaaatctgccggcaaataaagaatcggcctgtcataagcgggccgattctttttgtgtttacttttcaagaaaaatcaattactatgaaataatggaaaaaatcatatcttttaagtgtaacatctgggaggagcggcagtttgaatattcttcgcatcatattttcaagtgttccctatgtgatgttcgtcatcattttatcaagacatttaggatttgagttcgcaaaaacctattactggtggtttgctgcattttttgtcatcgggctgatcggcaaattcgcaatgcaccttgcggcaaaaaagaaaccgttaaaaaaagagacagcgtaaaatgcgcatgtctctttttatttactgttttgcagcacgctgcgtgtataagcgggattgtttgtaaagataccatctgctttttgtttcagcataataggcgtcagcgtatgctcgtcttccttatcaaaaaacacgtgcactttcatcttattgtgatgaatgcgcttcacgactgcttcatttgccaatttggcgttgagcccgactgtatcagcatacgttctgatggtttgcagctgcttatcatttatctcctcagcctcgttatcttttaataatcgaacaagaggaacttttttattcatagatcgaactttctttaagctcttcccgctaaaagactcaatgactgctttatggctggaaatcagcttatgtttttgtaatatgtcaatcagtttcttttccatcaccaggctgccgttgctttctcttgtctcaatatagtaattggcagtttgtccgaatttctgtatgatttcttctaatgttaaaatcttttctccttttcccgcattcagtttcttaatctgagccaaagacagatcatctgtcatccctttaccatctgttgtccgatctaccgttttatcgtgaatggcaatcagatggccgtcctttgtctcccgtaagtctatctcaatataatctgctttgtctttaatggcacgcgcataagacaaagctgtatgttccggctcaatcgcagaagagcccctgtgcgctatcaagacaggatgatagccggcggaagcatggatgacggagcagcctccggaaatggaaagtaatgctatgacggctaaatactttaattttttcataaaattaaagtatcatattctgcaggcgcaaacaatgtttcattcttcacgtcataaataaaaaaactgcgccgtcatgatttacacgagaggcgcagtccacccattacgaacttttcgtccaagccatcttctgaaatttgcggtaggctcttccgttaatataaaagaaaaatgacgtttttccgcttgccctgatcagctttcgcgcgaggcggcccatttctttttggccggcgactttgtcatcggataaatagacgccgagcagccccctgttgatcagccggtgaaaattttcatgcggaatgccttgcaaatgttcatccgctttttcaataaaatgctgcagtctctgcatcatttcttcatgagactgataatacgtacagaaattcagatcgccttcaagcagatcctcttcctggtcaattaaataatcaagcagtatatgcagcccttgtatgtacggaaaataactgctgcggattttctcagcggtatgttcgttaaaatcaggctggaatgagtaagcaacgagacagaaaatgcctaacgtcgatccggcgcaggccgagaactcaaaccactccatttccggaagctgtgaccggtactgctcaaaccagcctttaagcctcggaacgcgttcatgctcaacgacatgcttatgaacctgaaggtcgcaataataatcacacagctcaagcaaataaggtttaatgataccgtaatgttctattgacccgagcacccgctggcatgttctcaccagctcatgaagataaccgccgtcatcccgctcgtctctgtactgatagtacggccgcacctcggcgccgaccgtcagcgcgtcacgcatggaaagatgaagcatgcggaagtcctcgggatcaagcgaggtgctgcggtcgcacagattgtccagataatcactgattgtctgatacgcgatgataaattgcacgcatttctgtttctgctctcccgaaagcagggctaaaatgccgccgccttcacaatgaaacgatttatcgcggatacttgcggccgcctgctgccgcagttcggtatttttaatggaatctgatttttcccgccacatgttcaattcctgatgaacgagcggaaaaatttcccgatacacttttgccataaggttaaaaggatgttccggtactgtcaacatatgcacccccagcgaattcaaatatactgatctgtaaaggcttttgccgccttaaacacagtttctctttccggttcattaaaaatttcatgataaagcccttcccattcgcggtacgatttattatgggaagccacaccggaaaaccatttgcggaccttcattttatcgacgattttgtcatcaccgccctgcataagcaaaagcggcacctttaaaaacgcatcagtcggcaccatagcggcatcaatggtttttaaaagctctctataccatcttacggataccttcgtgacatataaagaatcgttttgatccgcttcaatcatatccgcattcctcgttgccatatcaggtgataagccggaatccactctgagggacggagcgaggacgttcagtcctttagacgcaaaatcaaggactttattgacttttatttgcagacccagacaaggtgatgataaaatgagtgccgtaatgcggggatttctctgctgcttaaaccattctatcgcaatcagtccgcccatgctgtggcccaaaaggaaaacgggcgcttcaagcgttctcgctttatcaatccatatatctacttcatcaatgtattcttggaaagagcgaatatgccctctggcgcgggtcgacgttccctgaccgggcaaatcgcccatcaccacgttatatccggaagatctccacatttcaacgagccatttatagcgcccgtggtattcgctcgccccgtggataatgacaatggtaccgacgggcctgtctgctttccaagtccacatgcagttcacctcttacataaatttagagaaagaaggatgagacatgataatctacccttataaacaatttacgcctgacatacatcctgaagcgttcattgcggataacgccgtcattacgggcgacgtcgtgatcggagaacaatcgagcatttggttctcggcagtcatccggggggatgttgcgccgacaaggatcggaaaaagagtcagcatacaagacttgagctgtctgcatcaaagtccgaaccgcccgcttcttattgaagatgacgtcacgatcggccatcaggttacactgcacagcgcaatcatcagaaagaatgctttaatcggtatgggctccgtcattcttgacggggcggaaatcggagaaggcgcgtttatcggcgccggaagtctcgttcctccgggcaaaaccattcctcccggctgtcttgcgttcggccggcccgcaaaggttatccgccggctgacagaagaagacatacgggacatggaaagaatcagaacggaatatgttgaaaaaggccgatactataaaacactgcaagagaaataaaaatagatcagctttgttttactactgtaccatttttcaaaatattatttaagtaataaccatttgcgttccgctgattgtcaggaaacagtagcaaaatgttcaggaatttgttttattcttcccccttttacccgatcctatgaaaaaagagcccatttcagcgggctctttttttacgctttttcggcgaatgtctgtccgttttccaggtttatgtgttttcttttgtggaagcctttcccgtaataggctgctaataaaatgccgaaccagacagggccgatgatgacagccaccctggtttctgcatcaaaagccatcagcacaacgacaaaagccagaaatgccagcgagatatatgaggaaaaggggtataaaggcattttatatttcagttttttccgttgttccggctgtaagcttttacggtatttcatttgggaaagcaaaataatcgaccatgtccaaatcgccccgaacgtcgcaatgctcgtcacccacgtaaacactttcgccggcaccacgtagttcagcaaaacgccgatgcataacgcacccgctgaaaccaataccgcttttcccggcacgccgccttttgtgaccgtaccgtatgctttcggggcttcattttgctccgcgagattaaacagcatgcgccccgtgctgaagatcccgctgttgcaggaagaaagagccgccgtcaaaacgacaaaattaatgattccggccgctgcgggaattccgattttttcaaatgtcaaaacaaacggacttccgactgaaccgatttcctgccacggataaattgacataatgacaaacaaagctccgacgtaaaaaatgagaatgcgccaaaaaacagtatctatggcccgcgccagtgatttttccggatttttgacctcaccggctgtgacaccgatcagctcaatcccgagataggcaaacatgaccatttgaagcgacagcagcacccctttaatcccattcgggaaaaagccgccgtggctccataaattgctgattccgagtgcaacgcctccatttccgaaaccgaatacgatcatcaccagaccgatcgcgatcattgacagaatcgccaagactttaatgagcgcaaaccagaattcaagctcaccgtacgctttgaccgccagaaagttgacagccgtcataatgacgagtgcacaaagcgcccagatccatgacggcacgtcagggaaccagtagcccatataaatgccgaccgcggtgatttccgccatgcaggtaacaacccataaaaaccaataattccagcctgttaaaaacccggcaagcggaccgagataatctctggcataccggctgaatgagccggctacaggcttttgaatcgccatttcccctaatgcccgcataataaaaaacataatcagtccgctgcaggcgtaagcggctaaaatccccggcccggcaagctttatggcagaagccgacccgagaaacagcccgactcctatcgcggcgcccaacgacataagcgagatatgccgctcttccaagccgcggtgaagcgttttttctttgttttgcataactctccctccccctgattttgacaaagaaacaacaaaccgagacgaaatagccagaaaacactttccggaatctacccgattagtcctattataacctttttctgaatattgcgtaatactttgtcgaaaacagagcggaatagacggtttacaaaagaacaatagaaaaaaggctttcgataacatcgaaagccttttggattaaacgaaaatgacttctttcggctgatgattcagctcttccggcacaagtcttttttcaacattgatgctgtgccagatcatgaagatcagcacggtccagattttgcggctgttgtccgctctgtcggcacaatgatcttccagaagctgaaggacataatccttttcaatataagcatctgtttcactttcacgaatgatgttgcgaacccattcgttcatttcatttttcagccagtggcggatcggcacagggaagccgagttttttgcggttaagcacatgatcaggcactaccccttcagcagctttgcgcagaaggtatttcgtcgtgccgtttttcgttttcagttcatccggaattttagaagccacgtcaaacacgactttatcaaggaacggcacgcgcagttccaatgagttggccatcgtcattttgtcagcctttaacaggatgtcgccgcgcatccacgtatggatgtcaacatactgcattttattaatgtcgctgtatgaacggctttccgtaaagtacggcttcgtgacatcacggtatgaaagctctggattgtaatgtttgagcagctgttttttcacgggctcttcaaaaatcttcgcattaccgatataacgctcctcaagcggtgtgcagccgcggactaagaggcttttccctctcattccttcaggcatgacggacgccacatgaagaagcatttttttcagaccggacggaatgcgttcaaacggtttaagcgaaagcggttcgcggtaaatattgtacccgccgaacagctcgtccgcgccttccccggataacgcgaccgttacatgttttttcgcttctttcgcgacaaagtacaaaggaatcgccgccggatctgcaagcgggtcatcaaagtgccagacgattttcggaagctcgttcatatactcctcgggagaaatgactttgctgatgttttcaatcccgagcgcggcagccgtttccttcgctacgtcaacctcactgaagccctgctgctcaaaaccgacggaaaatgttttaaggctcgggtgaaattctttcgcaactgagacgataaaagaagagtcgataccgccggatagaaatgaaccgacaggcacgtcacttctcatgtgaactttgacagagtcaaagattgcgtctctgacttctttcaccaatttatcttcatcagactgaacaggcttaaagttcgctttgaaatatgttttaaacgcgatatcgccttccggacggatcgtaaactggctgcccggctcgacttttttcacttcagcgtcaagcgtgctcggttcaggaacgaattggaaagacatatattgctgtaaagaagctgtatcgagatcaataccgttttgagcggccattaaactctttctctcagaggcaaaatatactttgtccccgatcgttgtgtaatacagcggtttaatgccgaacgggtctctcgcgccgtacatgacgcggtcagctttgttccagattaaaaacgcaaacattccgcgaagctttgaagcggcttcttctttataatgacggtatgtcgcaaggagcacttcggtatcggaatctgtattgaaagtgtagcctttcgcttcaagttcttctctcaattcaatgtagttatagatttcgccgttaaaaatgatccaatatttttcgtcttcatatgataaaggctgtccgccgttttctacgtcaataatactgagccgtctgaagccgaatccgacgtgctcgtcatgataatacccatcgctgtcaggaccgcggtgaacgatcatttggttcatttgtttgattagctcttcttgatctgcggtttgagttaatggatgcttattaaaaacaccgacaaatccacacatagtatagcctccataagtgtaattttctaattggaccccctttttatagacgctttgttacgccattggtttcacgctatgtaaaaaataagcatggcagcatctacaaaaagggaaagccgcttaagtaagcggctataaaattattctcctagtgcttctttgcgaagcgcatccgccttgtcagtacgctcccaaggaagatccacatcatgacgtccgaagtggccgtaagcagctgtctgcttatagatcgggcggcgcagatcaagcattttaataatgccggcaggtctcaggtcgaagttattccgtacgacttcgatcagtttttcttcagaagcttttcctgtatcaaatgtattgatggaaatagaaacaggctgtgccacgccgattgcgtatgcaagctgcacttcacaagaatcagcaagacctgctgccacgatgtttttcgctacgtatctcgcagcgtatgccgcagaacggtctaccttcgtcgcatccttaccggagaatgcaccgccgccgtggcgtgcatatccgccgtatgtgtcaacgatgattttacggccggtaagacccgcatcaccttgaggtccgccgattacgaaacgtcccgtagggttgatgaagtattttgtctcttcatcgatcagttcctcaggcacgactgggttaatgacatgctctttcagattgcgctgaatctgctcaagcgtaatttccgggtggtgctgagttgaaatgacgatcgcgtcgatgcggaccggcttgttgttttcatcatattcaacggtaacttgcgttttgccgtcagggcgaaggtacggaagaatgtcttctttgcggacttcgctcaaacggcgggctaatttatgcgccaaagagatcggaagcggcataagctctttcgtttcgttacacgcataaccgaacatcaggccttggtctcccgctccgattgcttcgatttcagcatcgctcattgtgccttcacgcgcttcaagagcctgatcgacacccattgcgatatccgcagactgttcatcaattgatgttaaaacagcgcaagtctccgcatcaaatccatatttggcgcgtgtgtagccgatttctttaatcgtttcacggactgttttcggaatgtcaacgtatgttgatgtagtaatctctccgcttaccagcacaagtcctgtcgttacagatgtttcgcaggccacgcgcgcgttcgggtcattttttaaaatctcatctaagatactgtcagaaatttggtcacagattttgtccggatgaccctcagtaacagattcagatgtaaatagtcgacggtttttactcattcacttttcctcctgaaaaaagatcttttacaagaccttctcatatgatacggaactcgctccctcttaatacaatgtcatactatatcagagaatgttaattggcatattttatgaaataaaaaaaccttttccactcgaggaaagggtttggtctgtgtgcctttcactcttatcgctcaaggaaaatattaaaccttgcatcaggttagcaccttggtttcccacagtgttttcacctgcttttttacagagaaaccggttgctgggcttcatcgggcctgtccctccgccagctcgggataagagtatccgctcaatgaaatatcttatcgtaaaagggcggaaagtgtcaatatgaattaaagcgattacgcgcctttatttcgggaagcaatggaaaaacacaaacaaaaaacctcaaatagtatagactattttcagatatatgttatactaattccacattcagcgaaatacaaataaaccggcaaaggaaggtttttatgaaattagttgatttaaccgcagatcttcaagcattacttgcaagtccgaatgtgcatcataatttatcggctccaaaacttaccgaaaaagtgatcagccgaaatgaaggaacgctgacatcaacgggcgccgtacgcgccaccaccggcgcatatacaggccggtcacctaaagataaatttatcgtacgtgaacaaagcacagaaaatcaaattgattggggcgcggtgaatcagcccatttctgaagaggcgtttgaaaagctgtacgccaaagtcgtcagctacttaaaacagcgggatgaactgtttgtttttgaaggattcgcgggagcggatgaaaaatacagactgccgattacggtcgtaaatgaatttgcgtggcacaatttattcgcgcgccagctgtttatcagaccggagacggatgaaagagatccgcaagcgcagcctttcaccattctctcggctccgcattttaaagcagatccggagacggacggcacgcattcggaaacgtttatcattgtctctttcgaaaaacgcgtcattttaatcggcggcaccgaatacgccggagaaatgaaaaaatcaatattctccattatgaacttcctgcttccgcagcaggatatactgccgatgcattgctcagccaacgtcggtgaaaaaggcgatgtcgccctgtttttcggcctttccggcacagggaaaacgacgctttcagccgatgcagaccgcaaactgatcggcgatgacgagcacggctggtcagattccggcgttttcaacattgaaggcggatgttacgctaaatgtatcaatctgagcgaggaaaaagaaccgcagatttttcgtgcgatccgcttcgggtctgttcttgagaatgtcgtgcttgatgaaaaaacgggtgaagcggattacgacaattccttctacacggaaaacacaagagccgcatatccgattgagatgatcggcaatatcgtgcagccgagcattgccggccatccgcaggcgatcgtctttctaacggcggacgcattcggcgtgcttcctccgatcagcaaactgacgaaggaacaggcgatgtatcatttcttaagcgggtacaccagtaaactcgcgggaaccgagcgcggcgtgacatctccgcaaacgactttctcgacgtgcttcggttcaccgttccttccgcttccggcgcatgtatatgccgaaatgctcgggcataaaatcgacgaacacggcgttcaagtctttctggtcaacacaggctggaccggcggagggtacggagtcggagaacggatgaaactttcgtatacaagagcgatggttaaggccgctattgaaggcagactgaaccagactgacatgacggcagacagcattttcggcctgcgcagccccgttcatgttccgggcgtgccggatgaagttcttcagcctgaaaacacgtggagcgataaacaagcatacaacgaaaaagcgctgtttttagccaatgagtttaaagaaaactttaaaaagttttcccatgcagactcgattgccaaagccggcggacctctcgtgtaatcaaaaaagccaagggcgtttatgccctcggcttttgttttttcagtttgtcgaatgaagcgacgtgagtctgtatgtaatgcttgtccggccgttcgcccattcgagcttttggacctcgccggtgccggatttctcgccggttttcgttttgcgcacgtccatcggaatatcaagaggatagacgcggtagccctctttctccaataaaaagatattttcctctatccgtttttcattgccttttgtcacaatcatggtattaaattcaacaggcattcccaaaatgaaaatcccctttcattctcttattctttattatcatatcataaatcaggcatcttaccgcgtcttcatccattctgccagccgccggacaatgcgtctgttttcctgcggcggaaaataatgcgtaaaaccgctgtaataccaagtttccaccggtttccccgcctctttcagcttgtcctcgatcagccgggcgtgttcgatcgaaacattctcatcattctctccatggatgagcagcacaggggcctgaatgcggtctgctttttcaaacggcgaacgccatctgtattcatccggcacctttttcggcgtgccgccgatcacccgcttcatcatccgccgcatatccttccgctcttcataagtaagcaccatatcgctcacaccgccccatgatacgagcgaagccgcttgatgccccatttcaatcgcggttaaaagccccatgattccgccccgggaaaaaccgaaaatatgcacccgcccttccctgacgttcggatgctcccgaagcaggcgaaaagcggaaaacgcatcctctctgtcctctcccgcaaaatcttcatttccctcgccgccctggttgcctctgtaataaggcgcaaacacgacaaagccttgggaagcgaattgaacgattcttccggggcgtaccatgccgacattttttatgccgccgcgcaaatataaaaaaccgtcatatgtgcccggcgccgcaggctcggcaaggagcccctttaccttcagcccttctgactcatagcataccgcaaagaggcggacatgcggactcggagacgggaaccttttcttttctgccagcaaaacaatgcgcctccttatatcatcagtttttttattctttcccaacgtgaatatgggcactcacacattttttatacccatcatacgatatgtaaagcagaaaaggttattttaacgcttaaaacaaggaggttacaccgtgaacaaatggctcaaaacgggctgcgtttttgtcatatgcgcctttttcctgctcattcttccggcctgcagacaggaagaaagtctgacgaaggtaaaggtggcggaagtcacacactccatcttctatacgcctatgtatgtcgctgaagcaaaaggtttctttaaaaaagaagggctccaagtgtcacttcaaacaacatggggcggagacaaaacgatgacatcgcttttgtcaaacgggtctgatatcgcgctggtcggttctgaaacatccatttacgtggaggcgcagggagcaaaagatccggtcatcaacttcgcgcagctgacacagacggacggcacatttctcgtgtcgcggaaggatgagaaatcattcaaatggagcgatttaaaaggaaaaacatttctcggccagcgaaaaggcggcatgccccaaatggccggtgagtacgtcctgaaaaagaatcacatagagccgaaagaagacattaacctcgttcaaaacattgatttcgccaatatttccaacgcattcgcatccggaacgggtgattatgtgcagctgtttgaaccgacggcatcccaatttgaaaaagaaggcatcggccatatcgtcgcatctttcggagaagcttccggccaagtgccatacacaacctttatggcaaaagaaagttatttgaaaaccaatgaaaagacggcggaaaaattcacccgcgccatctatcgcgcccagcagtgggtggaaagccatccggccaaagacatcgcaaaaacgattcagaaggaatttgccgataccgatccggccataatcgaaacatcaatagagcgctataaaaaacaaaagtcattctctgcagacccagttctgcaaaaggatgaatgggaacagcttcaatctattatggatgaagccggagagctcccgaaacatattccgtacagcaaactcgtcaacacaaaaatcgccaaaaaagtcacctcagaacaataggaggaacatgaatgtcttttttacatgtcgatcatgtaacacatacttatttctcgctgaaagaaagaacaaccgccgtgaaagatatacattttcagattgaaaaaggggatttcatctccttcctcgggccgagcggatgcggaaaaacaacactcctgtccattctggccggtcttatcacccctgcgcaaggcagggtgctgattgaagggagcgtgccgaaccataaagaacaccaaatcggttatatgcttcagcaggattacttatttccttggaaatcaattgaggaaaacgtgctgctcggtttactcatttcaaaaacattaacagaagaaaaaagagctgaagttctcagccttctgcctaagctcggattaatcggcgttgaaaagaaatacccgaaagagctgtcaggcggaatgcggcagcgggcggcacttgccagaactcttgcgccggacccgggcctgctgctccttgatgaaccgttttccgcgctggactttcaaacgaagctttctttggaaaaccttgtcttcagaacattaaaggattttcaaaaaaccgccgtgctcgtcacccacgatatcggtgaagccatcgccatgagcgatacgatctatttattttcgaatcagccgggcaccatccaccaaatattcaccgtgcctaaggagctcgcggctttagatccgtttgacgcgcgtcaggatccggcctttcagccgctgtttcaaaccatatggaaggagctgaattcccttgaaaaacagcagcggcacgattgaacagcttcatcagcagtttaagaaaagacaccaaaaagaaaagctccgggtccgtgcgtatcaggccgccattttcatcgtattttttgccggctgggaaatatcgagcagggcgggctggatcgatccgttaatcttcagctcaccctccgccgtttgcaggcttttagttgaaaagattgcggacgcatcccttgcggcgcacatcggcgtaaccttaggagaaaccgttctcggctttttgctcggcacgctcctcggcacatgcctcgccgctctgttatggtggtcaaacgggctcgcccgggttttagacccgtacctcgtcattttaaacgcgatgccgaaggtcgcactcggaccgattctcatcgtggcactcggaccgaatttcacaagcattgtcgccatgggagcagtcatcagtgtcattatcacgacaatcgtcgtctttacggcttttcaggaagtggatgaaaactatattaaggtgatgaaaaccttcggagcgaaaagaagcatcatgtttaaagaagtcattctgccggcatgcgcccccgcgattatttccgcgcttaaagtgaacgtcggtttatcctgggtcggtgtcatcgtcggcgagtttctcgtttccgaaaaaggtctgggctacatgatcatttacggattccaggtcttcaatttcactcttgtgttcttaagccttctgatcatcgcgatttttgcgacattgatgtatcagggagtcgaactgttagaaagaaaatggacgaaaggaaaaatataaaaaagacccgtgcgtaagcgccgggtctccgttttttatgattgaaatacgccgtcttctttcagctttttcagactgatcggaagcaccgaatctttcataatgaaactgaattttttatttcgggggagattctccggcagttcgctgaacagcaccggcccctttgtttcaaaataatcagcctgtttttcaagcttttcaatatcggcaaaataaatattcttcacgattaccttttccctgccgagaactttatactgtccgacgtacttcagatgtcttaccgcggcaccggtttcttctttcacctcgcgcagggccgcttcctccgcacattccatcggctccacttttccgcctggaaattcaaacccccggtcttcgtgctcagtcaaaagccacttatctccgtatcggcatatgacccatacgtgcttcgggctgtctgaaaaaggctggtgttcaaaggagagctgaacagtgttctgataatagtctttaaactcgtacatgtttatccctctaatccgttccttcatatcttccatacatcataccacagttgcgtttgttcggaagccctttatcaaaaattcagaggaaaaccatcatacccgctagtatagcctcctttgaagcaaatgttacggtttgcgcttgaatttatttttcagggtatccaatagatcgacgagcacctgcgggaccggtatgcccagcgagcttgccgtaatcacgatctgaacagattcgtataagatataaaacatgatagccaaattacggatggcgccttcggtatgaagcagctggtcaaaaaaatggcaaactgagactaatgccagggtcacgatttttttgaccagccgcgcaaaaagctttcttgcgctcagctgctgcaaaagagattcttttaagcttgtactgataaactcaatcgccatgaccgatagcaaaatcagaaacgaatactgaaaacctccgaagaaaaaccccgctgccgacacgatcactgcaaaaaacgaaaagatgccaaagtctttgcccacttgatccaacatcctttcacagaaacggccttacattattctatgaaaagtgaatggaacggactggatttttcagaaaaatggacaacacctctcttcggcagccaaataaaagaccgagtgctttacagccccggtcttcccttgttgattatcctaaatacgctttcagcatccagttatgtttttcgatattctggtgaatagcaagcagcatatcaccggtcgtttcgtctcctacctcatctgcgaggtccatgccgcttttcagctcttccgcaatgacagtgaaatcatcataaatgttctgtaccatttgttctgcgctctcattgccttccgcttcttttacagacgctgtcttcaatgattccgtcattgtgccgatcggcttgccgtttaatgccagcagacgttccgccagatcatcaatatatgtagccgtttcgttatacagctcctcgaatttttcatgcaatgtgaaaaagtccttccctttgacgtaccaatgatagttatgtaatttcacatacatgaccgtccagtttgcaacttgcttattgactgcatccaatagtttttctgacatgcctatcttcctcctttggtttactattgatataccctatatatcgtgtgttaaaacataaatttttagcccttgattttacggatggaaaatatgttatgatttgttaaaaaggagggatttcatgctgcttcttctgagcttcggctttcttatcgtgctcgccgtgctgcttttatccatctggtcgactgtaagagcttataatgtaaaacatacgattgacccgccggaggacgcatcaaaaggcttgacggataaaaaaaatccttaatggtgatgcgtctgttcctcatggccggaggaatcatcggcagcttcagcatccccgacacgcacttttacagtcggcatattatgctgctgttttgccgttacgtgggattgaacggtatacacaccctcttcatcaaattcagtccgcaggtgatacgcccctttttcctccttggccttgcttgttttgctgctgcctttttttccttctttccatacttcaaacataacttcatccgcatccgtgacacgcttgccgccgtaaaaaacctccgccttgtattccgctttttcatgcggtgctgccgtttccggtcctgtaagcttgacctcaagcgctttaggctcttcatccgcggaggttttgtccgaattgcccccgcaggaagataatagaaataccataccgcacatacctgccaatacagcccgtttcatcccatcactccttcatgtttgcttctattttagcaaacgcttacacataaggtgtgacattttttagaaatatgtaaaaaagcctttttgcatgtcagcaaaaaggcctgttttttatccgaacactttcagcaaatcttctttatcttgtgacagccagaaacgcatcagacgttttgcgccttctaaatcatgaagtttcgcctggccgcactgtttttcgttggccgccggaatctccgtaatatcgatggcttctttcagcgtagcgtcaagcaggtctacaatttcttccgctgtcggctcgccgctgacaacaagataatagcctgtctggcagcccatcggtgagatatctatgatgtcgaagtgatcgtatttctcagaatgtgtgcgaatcgtaaacgcaagcaagtgctcaagcgtatgaatcgtatccggcttcatcgcctgtttgttcggctggcagaagcgaatgtcaaacttattcacgacgccgtctgttccgactttatgcactccgcaatgtcttacatacggagccacaaccgcattatggtcaagctcaaaactttctactgaaggcataatggcactccctttttttcagaatatgcatccattataacacagttttccgataagaattgtggcggaagcttttcaatctgaaattttttttctatactagcatcagaaaggtggttttttgatgaaaaccataatgattgcgttcatccgcggataccagaagttcatctctccgctgacaccgccgtcatgccgcttttatccgacgtgttcgcagtacggaatcgaagccgtcaagactcacggcgcattaaaaggcggatggctgacactgaagcggattttaaagtgccacccttttcatccgggcggtgttgatcccgtaccggacaaaaaacaaaaacattagtccatatgctggtagccgtcgatcaccagatcaagtttaccggtttcaggatcaatcaccagaccgtgcaccggcacattgtcagggaatagcggatggtgtttaatgacgtttacgctgtctgtaacacttgcttctactgaatcaaagcttttcagccattgatcaagatcaactcctgagtgcttcagcatgtcaatccgctctttcggaataccgcggtcgataattttatcgagcatatcctcgctgttgattttgctcatgccgcaatcatggtggccgataacgcagacttcatcggcgtttaattcgtatacggccactaaaaggctgcgcatgatacttccgaacgggtgggcgacaagcgcgccggcacttttaataattttcacatcgccgtttcgcatgttcatcgcatgcggaagcaattctacaagacgtgtgtccatacaggacaaaatcgccatctttttatccgggaatttagatgtttggtatttttcataatctttgtttttagtgaactgctcattaaattgcatgatatcgtttagaagactcatcttggtgtttcctttctgcttttttattcacaatataacataagacgggtcatttcgtcactccccgcacggatgacaaagtgctcaataaataagacaaaccccattgggcttgtcttatttccccatattgtattttttgttgaactgttcgactctcccgcctttttcgttgaatttttggcggcctgtataaaatggatgcgtatctgagctgacctctactttaatcagcgggtatgtttttccgtcttcccactctgccgtttcctctgattttttcgtagaatggcttaaaaagcgatagccgctgttcacatcttgaaaaatcacctgatggttatccggatgaatatcttttttcatgctgatctccctttctcaaatcgtaataattacgttttattctaaaccttaaataaccgcttgtcaatcatatatgccctgatcccttgatttctaaaccctgcacatatatggaatcggaagaataatctaatcgcttcagcaaataatataaccacattacataaaacggtaatttagaaaggcggtttatgatcgtggatgatttagtgttagccagaagcctgttcgggacaaccatgggctttcatattatttttgcgacgcttggtgtcggcttgcctctgatgattttaatggctgaattgatttatcaaaaaacaaaagatccgcattatgccattatggcgaaaaggtggacgaaggcgcaggctgttctgctcggcgtggcgataccgaccggaacgatcgcgggtacacagcttgcccttttgtggcccggattcatggaagtcatcggcagggtgatgtccctcccgtttcagattgaaatttatgctttctttatcgaagcgctgtttatgtccatttatgtctacgccgctgaccggctgactccggcgatgcgtatcattgccgttatttttgttttgatcggcgccgcggcatccgccgtcttaatcacaaatgttcacgcatttgaaggaacgccggccggctttaaaattttaaacggcaaaatcactgacgtcgaaccttgggcagcgttttttaatccaagctttttcaccaccgcgggccatgtcgtactgacggctttcatgaccggtgcatttatcgttgcgtcagttgcggcttataaaatgctgagaacgagaaaacaggagcaggtataccgctttcaccgaaaagcgctgctgctcgccttaacgatcggcgggatattctccattattgcctctttaaacggtcacgagtcagcccagcttctttacgaataccagcctgagaagcttgcgggcgcagaagggctgtttgaaactagatcacacgctccgcttgcgatcggaggttttactgatgcaaaagaagaaaaagtaaaatgggcgatagaagtgccatgggctttaagctttttggctgcaaacagctttgataccgtcgtcaaaggattgaacgcctttccgaaagacgagtggccgcctttattcatccatacactgtttaacggaatggtcggcatcgggatgctgctcattttgtactcaatcatcggcatcgtgtggagaaaaattttaaagaaagacagctttccgacttggcttttgattttatttttaaccgcaggaccgctcagtctgatcggaattgaattcgggtggatattcgcttgtacggggcggcagccgtgggtgatttaccatctcttgaaaacgtcagatgtcgtcacgacaaccggttcaatcggtttgctgttcatcctgtttacagtggtttacgccattttggcagccgcagtcatttatgtgctgctttattatttccgcaaacatcccgttgaggaggatgtaaaagcggcggaatcctaacaatagaaagggctgaattgaaatggacattaccatggatgctctcattgcgatatccatcgtatggggcttcgtgtttatctacgcggtcatggcaacgatggacttcggagccggcttttggtcgatgatttatttaaatagagaacaaacaaaggcgacaaacatcgccaaccgttatttgtccccgacatgggaagtgaccaacgtctttatcgtcgcaatcgttgtcgccctattcagcttctttccaggggcaaccttcgtgctgggaaccgttttattgatcccggggagtattattttgctgcttttagccatccgcagcggctttctcgtcttctccaatacggcgaaggaaagaaaaatcatgagatatatctccggaatttcgggcttcattattcccgctgtgctgattttggtccttccggtcacacacggaggatttattgataagacgggcggcgtgtatcacctgaatttggcaaatgtctttacaagccttaatgcgtatgcgtttatcggctttgccattttaagcactttatttttatcttcactgcttctggccgatttttcaaatgttgcggaagaggagcatgcgtaccgcatctacagacggagctctttaataacagggccgctgtcgcttctttttgccttcttcattatgctgacattacgctctgaagccggctggctgtatacgggcatgatgaaagacaagacatggctcattctgtctgtcattacatttatcattgccggcgtggctctgtttttgccgaataagcacttcggccgcaacctcggcaaaccgagaatcgccatgatcgccattgcgcttcaatactttctggcaagctatgcatacggacgggcgcatcttccttatatgatttatccggatattacggtcatgtcaggatttacggagccggcaaccttcagggcgctgtttatgacgtatatcgtcgctttcatcattttgtttcccgggttttatttcttctggaagctctttatgaaagacagacgttatatccgccaggaggaataacaaaaatcagggcggctcatactaatggcgtaccttttatcttggaggggagccagcatggaccaaaaaattctgtgtgaagtcaataactgttcatattggggcagaggaaacaaatgcacggccgacgctatttatgtggtcagccatacaggcgaaaccgctgaaaaaagtgaagaaacggattgcaaaacctttaaaccgcatgatttataaaagaaaagagctgttttatacagctctttttcatttccgtgccgcaagcctttttgaaatcagcccctgagccggagaaaaccgcgcggatgagaagcatggcagaaaggcggttcgccggcaaatatatgcggcggcagacagtacaatatcgcattcatgacaagcacataattttttatcaagatgtacatcttggccccagccagagagcaacacctgcgcgctgtttgaagaataaaaaaatcatcgcattcgcctataaaaaaaaccggctgatacagccggttcaaactggggaaggggtgatgatgaacaatttcaatataacagcagcatacaggcagctcaactcgctgaaatgtctttttatcagttgtttgtcgtaaaaacgtccatttgggtgacgtattttctcattatttcctgattgacttcaacacccagtccgggaccgtccggaacagagatgaacccctcttcgatacggatgtcgggagtgacaatatcctcctcccagtatcggtctgatgaggaaatgtcacccggtatcgtaaattgcggcagcgaagcgagcgcgactgtctgcgctctcgaaatgccggtttcaaacattccgccgcaccaaaccggcatgtgatgctctctgcataagtcatgtatttttaaagcctctgtcaggcctcctacacgcgctggttttatgttaatgattttacagctcccaagctcaatcgcccgccttgcgtcatcatatgagcatatgctttcatcgaggcataccgcggttctcaagtgtttctgcaggtggcggtgatcgacaatatcatctgcctgaagcggctgttctatcatcatgagctggaattcatccaactctttcagcctgctgatgtctttcagttcatatgccgagttggcatccgccatcagcggtacgttcggaaaacggctgcggatgactctgatcagatcaacgtcatggccgggctgaatttttatttttatacgttgataaccttcttttacgtattgctcaatttcccgaagcatctcatcagccgaagccagacccaccgccacgccggcgggcactttatctctttttccccctaaggcttctgcgagagatatcccctttttcttggcatatagatcccacacggctgattcaagccccgcttttgccatgcggtttcctttgaaacgcgcgagactgtcaggcacttctgacggatggaaaaactcgcggcctacgacatttgggataaaaaaatctctcagcatatgcgcgcatgtctgaatcgtttcttctgtataccacggagaagaaaacgccgatacctccccccagccggttctcccggtttcatcgatcgcttccacgatcaaaaatttacggtcctgcagcgtttcaatacttgttttaaacggttttttcagcctcatacttacatgataaagggtgattttttcaatcttaatcatgacaattctcctttacgaagctcattcagccgatgcctcatcagtttattggacgcgttccgcgggagcccgtcaacctcgaaaaaagcagccggtattttatattttgcaagccgctcacggcaaaaggcggtcagctcctcagaactgacagaagaagtcagcacgagaaaagcatgcggcactttcccccacttcgggtcttcggctcccgaaacaccggcctcccctacagccggatgggcaagcagcgccgcttccacttctgccgggtagatgttctctccgcctgaaataatgaggtccgaccgcctgtccagcacgtataaaaacccttcatcatccaaatatccaagatcgcccgttttaaaccatccattatgaaaagcggcctggtttgcgtcatcacgatggtaataccctttcattacattcgggcctttcaccgtaatttcaccgtgttcaaacggcgcacaagggttcccgtctttttcaattctaatttcacatgaaaacagcggtttaccggccgagccgagcttgtccatactgaattccggagaaagcgtgacaatctgtgagcaggtttcagtcaagccgtaagattgaaacaccggaaattgtttcctgcggcattcttcaaggagcggcagcggtgcaggacccccgccaagcagaatgcagcgcagtgattcaggacattgttcagtttccgcaagcaggcccgaaagcatggtctgcaccgctgaaatgatcgtgacctgatgggagctgatgctgtcaagcacatcagtgacagaaaatttttgatgaagcacgacaggcatgccgtaaatgaccgacttaaacagcgcagacagaccgctgatatgaaacagcggcagcgcaataagccagcggtcccgctccgtgacccccagattcagcgcagacgatacagcgctggaataatgattaccgaaagtctgctgcacccccttcggccttcctgttgttcctgacgtatacataagagtcgccgtatcatcaagcgttacataagcttctggctccatgtcacccgcctcttcagcctgcagctcgtccacatctgcggtggcgaccgcagattcatattcttcgcggcaaaaaccgtcctccgtcaataaaagctttgcctgtgaatcttcgagctgaaacaaccgttcctgttttgagagcttcgtattcaacagcacagcttccgcccctaataagaagcaggcgtgaacggcataaaccatttccggtctgttagaaagcaaaatcgcagcgcggtctccttttttaagcgagcagtatttggacagccgcgcggccatttgcctagaagcatgatataattctctgaatgtcatctgtttgttttcaaatatgagagcgattctctctggtgtcagctgagccctttgaatgagccaattcggctgttctgtcagcatgttatcatctccgaggtaaaagtactttttttgaaaagaaaacagcttggaccagagcggctcaagctgtttcgtagtgtcatctgatcacggaaaacgagggaactgaccgaaatcgggactgcgtttctctttaaaggaatcgcggccctctttcgcttcgtcagtcgtgtaataaagaagcgttgcatctcctgcaaattgctgaattccggcgaggccgtctgtatctgcgttaaatgccgctttaaggaaacgaagggctgtagggcttttctcaagcatttcttcacaccatttaattgtttcctcttcaagtttctctaatgggacaactgtattgacaagccccatgtcgagcgcttcctgcgcgttgtattgacggcacaggtaccagatttcacgggctttcttatgtccgacgatacgcgccaggtaacctgagccgtaaccggcatcaaagcttcccactttcggtccggtttggccgaaaatcgcgttatcggccgcaatcgttaaatcacagacgatatgaagcacatgtcctccgccgatggcatagcctgataccatcgctacgaccggtttaggaatcacgcggatcaaacgctgaagatcaagcacattcagacgagggatctgatcgtctccgacatatccgccgtgaccgcggactttttggtctccgcctgaacagaatgctttatctcccgctcccgcaagaacgatgacaccaatattggagtcatcacgcgcacgagcaaacgcgtcaatcatttctgataccgtcttaggagtaaatgcgttatgtacctccgggcggttaattgttatttttgcaataccgttatacgtctcgtacaggatttcatcgtactgacgttcacttttccattctgcagccattgatatgacctccttcatttttgcctgagtccggccgaaaagctattttctttatgctttacaagccgtataaaaactcacttactatcttaccaaaaattcgcggctgttccacatgtaccgtgtgccccgcctgtttgacaacctctattttacttgatgggagcaggttatgcaccttttgattaatagcgcaaaacttttcatcccattcaccgcatatgagcaggacgggcgccttgatgcggtgtaatgcctcccaccaggaaggctgtgagcccgtccccattccgagcaggcttcctgcaagtccggacggattatttttcagcctgccggcacggatggatgcctttacgctgtccggcagagaaagctgcgaggcaaacaacggaatgccctcccaataatcgacaaacgatgttataccttcccgcaatataaagtcagcaagcttccggtctgactgaatccgctttttgcgttcctgaagcgtgctcaggcccggggttgtactttccaaaacaagcgctgacacccgatgcggaaatgcctgtgcaaaggaatacgcaagtcttccccccatagaataaccaataagtttcactttgtgaagttttaattgatcaaaaacggcggcaaggtccgcaacctgccggctcgcactgtaccttgccgcttgcacaggcgcgtctgtctccccgtgacccagacagtcaatcatcaccattcgttcgccgggaaacatgccgcgtaaaaacatccatgattctttgctgcccgtaaatccatgcagacaaacaatagcttcagatgattcgtggccgctatcagcagcccgatagcacacgccgtcggccgttttaactgttacagcttccattcttttttcacttcccgcactgcggcctgcagcagatcgcgatggaattgaactcttgatgtccgatctgttttcagctcgattatatgaagtccgggcttgtccgcctgcggctgatacgcatccttaaatgcttcccatgtctcagggcaagtatacgtcccgccgtacagtgcggcggcatgccggaaatcaaggcccgtcggcgtaccgaacagttcttcaaaatgagtcttatcagatgcctgcggcaaaaacgagaaaatcccgccgccatcattgtttattaaaataaccgtaagcggaattccaagttttttagccgctaacagcccgtttaaatcatggtaaaacgataaatctccaattacaagcgtgacaggagcttttgtaccttcacacagtcccatagccgaggagacaaccccgtcaatgccgttagcgccgcggttggcataaacacggaaggaacgatcttgtttttcaaagaacgtatccacgtcgcgaatcggcatgctgttgccgacaaaaatcgaactgccttcagggacaagatgctgaagctgacgatatacatttccttcaaaagataaatcatccatgctcgcatcctgtaaatgactccggaaccgctcattgacaaactgccatttctcaagccatccggacggccgttttccggtttcagctgaacggaccgcttccaaaaacacagacggatggcaatgaatcatatgcgcgccggcctgggtgggatctctccatcctccgtcttcatcgacgataaactgctcaatggcaggatcatctctgagccataaaaagagcggtttcgaaaccggcatcgggccgaagcggatcacagcgtccgggcgcagcgcctcttttatttcttcatcttttaaaaacgagtcataagcatcaataatcagcgtcttatcatgctccccgtttcggaggtttgaaagcgggtcagctaaaatcgggaactgaagcatctcggcaagcgcgatgatttgctgcttttctgcttcaccgtgaatttcgccgcagacgatcacacctttttcggtacccgcaagacgctctgtaatatgacagagagaatcttgatcagctgactgaatccctgttgtgactgagacgtgccgcccctttctcattctttcaaaaggtccggctgataaatccggcatcaaaggctctctgagcggcacattgatatggactggccccatcgggcgcttcccggcttcactcacggctctgccggccaatgttctgatatagctcagcatttgaggattttcttcaggcagagccgagtctgtgaaaaacttaacaaagttaccgaacagaaaatgctggttaatcgcctgaggcgcccccacttccctcaattcatgaggccgatcagcagtcaggacaataagaggcactcttgaataatgagcttcaatcacggccggatagaagttagccgccgccgttcctgacgtacaaatcagcatgaccggacgctgacgggcttttgcaagaccgagtgcgaaaaaacctgcggatcgttcatcaatctgtatatggacttgaatatccgggtgggccgccgccaaaaccgccaagggagttgacctcgaccccgggcaaacaaccgcgtcggtgacacccgatagagcgaattcatcaataaagcttccgatataatgtgtaatcgggtttgtcaaagcctttcacctcctaaagcagagatcatcggctttagtttaatttgtgtttcttcatattctgattgcggatctgaatcttcaacaatgccgcagcctgcgaaaagccgcgcatttttgccttcaatcagccctgatcggatagccacgacaaattctccgttttccctgccgtccatccagccgatcggagccgcataccatccgcgtgtcatcggttcaatatcagcgataacttcaacagctttctgctggggagctccgcccaatgccggcgtgggatgcagcttttcaattaaatcaaacagcgaagcggacgttttaagatggcctgtgatcggtgtatatagatgctgaacactttttgttttatataattgcggacctgcaggctttttcacatcgctgcagctcgacaagaaagaatcgtgtatcatctgaaccacaaaatcatgttccgcgagatttttttcgtcatgcagcagctctttgccgagacggtcatcttcttgttgattttctccgcgcttaattgaacctgccagacaggtggacataacgtctttgccggattttttgatcagccgttccggtgaagcgccgacaaagcatttatctccctgctcaatcgcaaaaacatagcttgtcgtttggtccttcaaaagcttgcggacaacgctctctgtcggaataggcccatcatatgacaaaacgacttcccttgccagcacgactttatcatattgatttgctttcatatcatttgttgctgttttaatggcttcaagccagttttccacatcaagttcttccgcttttgttaaaacaggatattcttcatactcgattgaagaaactgaaaaagcttccgaaaaagatttcagacgtttcagcgtatcttctgcctgattaccgtctgccgcccattgattgacggttaaataatcaccatctgccgtctttgtcagcatgagtgaggggataaagaacagtccttcttcgaacccgttccattcgtctcctctctcttcagcgggattaaatgaaaaaccgccgaataagacagggccgaccgcggtatgcgccgcctcttcttcatgaatatgaaaagccgtctttttaaagcgctcccattgttcaaaaacgtcgtgataacgctttccatttttttcattcgattggaacagcgcttctgtgccaagaccgactattgttaattcactaccgggttctgaccaaaaaaatcgtttgcctttatatttttttgctccgtctttgaaaaatgatagagggtctaaagacgcaatacgtcttgaatagctcaataagacagcatggttgacttgtttggctttatgtaatgcatgatctgcttcctctcggaacgtatgctgcaccgttgtcaccatgagacattcctccataatccgttaaatgcttttaatacaatacacctgtgatgactttgtgtcaaacacacagatttgagcacgacaaaatgcctgcatttcttattataaacctttttgcgcaaatgaataaagaaacaaacttgaattttctttccccactctcggcaatcactgtatccttttacttcctcatgggaaaatgactatttttatccaccatttttctgcgcaaaagcgttcatactaacagtaagcatcacatagaaacgagggattgatgtgcttacaaacgaacagattacacacttaaaaaaagaattggaagaagccagacatgatattttgagccgctttaaagaaaatgatcaatttcagttaactgatgaattcccgtatcagtcatccggcgaattgtcttcctatgacaatcatcccggcgatcaggcgaccgaattatacgagcgggaaaaagacctggctctgctcgaccatgaacgagagcaccttcgcgatattgattactctctgaaacaaattgaaaacggcacatacggcacgtgtgaagtcagcggcaaggacattccttatgacagactcgaagctctgccgacggctacaacattggcggaatattcctcgcaggatgccgtttccaaagacaggccgattgaagaggaaacaccgttcggacagtttgaatttgatgatgatgaatcaatccgggctgcttacgatagtgaagatgcttatcaggatgttgaggaatacggaaactcagaaacgcctcaggatttagaggatccgccgctcagctatggggatatgacaatgaactccgaagaaaacatcggctatgctgaggattatgaaaactttatcgcgacagatattaccggaaaaaacatttccgtgtatccaagcaaagcacacgaaaaatatgaacaggaactggacgaagaaggaataatgacgacctttggcgatcttcatgctgattaaaaccccggcctgccggggtttttgaatacaaataaatggtttgctgcattttcacactgaaaactcatacacttaatggtgcatgaaccttttaaaaggtttaacatttccaaaaaagggaattaacgtgttgacattgaatgacggaggggacaaatgaaaaagaagtatatcggtgcgattattgtatttatcattacatatgtcttgttttctttagcgggagttctctttcccatcgaccgggaatggtatgacgcgctgcaaaaacctgactggacgccgagcggatcagtgatcggcatcatatgggcggttttgtttgcgcttatttcgctctcagcagccttgatatacgcaaagttttcatgtaaagaatccaaagctttttgggtgatgcttctcatcaattatatcgtgaatcaagggttcagctattttcaattcacacagaaaaatttgcttgctgcatctatcgattgcctgcttgtggcggtgacaacactcattctgttgctcattgccggtaaatacagtaaagcttcagcctggcttctggttccttatttattatggagcgcttttgccacatacctgtcttttaccatttacgctacgaacgcataataaaaaaccttgcatagtatgcaaggttttttaatgacccgtacgggattcgaacccgtgttaccgccgtgaaagggcggtgtcttaaccgcttgaccaacgggccttatggcggagaaggagggatttgaaccctcgcgccgcttacacgacctacacccttagcaggggcgcctcttcagccacttgagtacttctccgtatggctccacaggcaggattcgaacctgcgaccgatcggttaacagccgatagctctaccactgagctactgtggaaaaatcatcatggtgggcctgagtggactcgaaccaccgacctcacgcttatcaggcgtgcgctctaaccagctgagctacaggcccatgacaatataaaaatggagcgggtgatgggaatcgaacccacgacatcagcttggaaggctgaggttttaccactaaactacacccgcatgttgtttggggcgattgatgggaatcgaacccacgagtgccagagccacaatctggtgcgttaaccacttcgccacaaccgccaaaacaatattaaattaaatggtggctcgggacggaatcgaaccgccgacacacggattttcagtccgttgctctaccaactgagctaccgagccttgttataaatggcggtccggacgggactcgaacccgcgacctcctgcgtgacaggcaggcattctaaccaactgaactaccggaccattttttggttgcgggggcaggatttgaacctgcgaccttcgggttatgagcccgacgagctaccgaactgctccaccccgcgatgataattaaattagatatggcggaggaagagggattcgaacccccgcgggctttgacacccctgtcggttttcaagaccgatcccttcagccagacttgggtattcctccgtataagtggtggaccttgtaggactcgaacctacgaccggacggttatgagccgtctgctctaaccaactgagctaaaggtccaatggtagcggcggaggggatcgaacccccgacctcacgggtatgaaccgtacgctctagccagctgagctacaccgccaaaaaacaattaaaatcaagtggagcctagcgggatcgaaccgctgacctcctgcgtgcaaagcaggcgctctcccagctgagctaaggccccaaaatggtcgggaagacaggattcgaacctgcgaccccatggtcccaaaccatgtgctctaccaagctgagctacttcccgtttttcaaaagtatgtatggcgcgcccgagaggagtcgaacccctaaccttttgatccgtagtcaaacgctctatccaattgagctacgggcgcaacaataagtgccgagggccggacttgaaccggcacggtagtcacctaccgcaggattttaagtcctgtgtgtctgccaattccaccaccccggcatggatggtatagtatagttggagcggaagacgggattcgaacccgcgacccccaccttggcaaggtgatgttctaccactgaactacttccgcgtttggcaatgcggatgaagggacttgaacccccacgtctgtaaagacactagagcctgattctagcgcgtctgccaattccgccacatccgcaagaaaaaatggtgagccatgaaggactcgaaccttcgaccctctgattaaaagtcagatgctctaccaactgagctaatggctcttattacaagagacttatatagtataacatataaaggtggtgccggcaagaggacttgaacccccaacctactgattacaagtcagttgctctaccaattgagctacaccggcttaatacgccaacttatgtatgataggaatggtggaggatgacgggctcgaaccgccgaccctctgcttgtaaggcagatgctctcccagctgagctaatcctccatatattacacttgagtgtaatggcttggcggc

SEQ ID NO: 36 - DNA, 183812 bp, Bacillus amyloliquefaciens
cctgcttaacggctttcttcagttgggagcttaatcttttctgagccgcccggcaatggtatactaatatcgtcccagactactaaaaagggagttagagagtgattaaacatgagttggctgaataaattttttgacttatttttaggtgaaaaagaagaagagcatgaacgtgaaccaaacacgcatgcccaaatcccgaaacagcagataccggatcagccagaaggcaaattcacgcgcatggaagatcctaaaatatattacgaatatccgaaagggaatttccgcttccccgtcgttccggacggctataagcgaacggagcaaaaccaaagacagcgggaaaggcacgaacgccgccagccgtcccgggattatgccgccgggaaggagcaaaccgagcggaaacagcatacacataaagagcctgaaacggtgaaaaagccctttaaaccgtcatccattccttcaccggtttacggctttcaatctcagcacagcataaaaaaagcgcctatatccgaaaagcggcgtgaagagaacgtaacactgctgtcagaggagcaatttgttccgacaaaagcccgtcaggaaacggaaaaagagcccgtcttcacaacatccggcataacaaaacagacgaatgaccggccagacccgtttgtgaaacaagaaacggaagaaatccaggccgttaaaaaagaggagcttcacaccgaggctgagaatgcaaaagagcaagtgtttgcagcaccagaaccgcagcaggctgaagagcgggagcacacggaaagcgcggaatctgccggctttacagaagaacaagagcatgaacaaacccgcccgcagcctattgaagagcctgagtatgaagcatcccgaacggctgacaacacagaggaacaagcggcgccgcaggaggaatatcaggagcctgagccggaaaaagcaccgccttttgaaaccgcagaagaaccggtgtatacatacacagaacccggatacgatgaggaagttcagccgcagtctgaagacaagcccgaatcagctgaaaccgacgcgaaacaggaagcagactctcagcctgagtacaatgaagtcacgcggcattcagagcccgagcctgaacctgcaagcatcgagacggccgatgctccgtcccggcctgccgaagaaaaaacggagtatcccggacagcctcagactgtgagaaaagcggagcggccgaaagagcgcaatgttccgtttaacgtcatgatgcttaaaagcgataaacacaagcagacgaagacgccggagggcggagcgagctatgtctttccgaatctgtcgcttctggacgtaccgccggcgcaaagacatgacgaccaatcgtggattgaagaacagcgcgagcttttaaacgttacactgaaaaactttaatgtgcgcgcccaagtcgttcatgtcacacaaggcccgtccgtcacacgttttgaagtgcatcctgagcccggagtgaaagtgaacaaaattacaaacttagcagatgatattaaactgagcctgtctgccaaggatattcggattgaggcgccgatccccggtaaaaacacgatcggcattgaagttccgaaccgtgtaagcaaagtcgtcgatttaaggcagatgatcagaagcgccgctttcaggacgaatccgtctccgcttacagccgcgctcggtgtcgatatttccggaaacccggtcgtcattgatttgaaaaagatgccgcacgggttgatagcgggtgcgacaggatcgggaaaaagcgtctgcatcaataccattttggtcagtctgctttataaggcggatccgagtgatgtcaaaatgcttctgattgatccgaaaatggtcgagcttgcgccttataaccaaattccgcatttggtcagccccgtcatcacggacgccaaagccgcgaccgccgcgttaaaatgggttgtggaagagatggaacggcgatatgaactgtttgcccattcgggtgtgagagatatcggccgctttaatgaattaaccgccgatcataagacaggcgaaaagctcccgtacctcgtagtggttattgatgagcttgccgatttaatgatggtcgcgccgaacgatgtggaagaaagcattgccagaatcgcgcagaaagcgagagcctgcggcattcatctgcttgtcgcgacacagcgtccgtctgtcgatgtcattaccggaatgattaaggcaaacataccgacgaggattgcattctccgtctcaagccaggtagattccagaacgatcatcgacatggcgggagcggaaaagctgctcggaaaaggcgacatgctgtactgggaaaacggtaccggaaaaccggtgcgcctgcaaggcaactttgtatccgacagagaaattgaccgcgtcgtctctcatgtcagaaagcagctgccgccttcttatttgtttgaacaggaagaactgatcaggcagggaactgccctcaaggaagaagacgaactgtttcctgaggcgtgccaattcgtcgtggagcaaaacagtgccagcacctcaagccttcaaagaaggttccgaatcggttataaccgcgccgcaaggctgattgacatgatggaagccgagggcatgatctcagaagcgaagggcagcaagccccgtgaagtgctgattacggccgctgacattgctcaagaataagaatatcgttcatttttctcacaaacatggtatgatagtggatggaccatcaaaactgcatcactgtcacgcgctgaaatatcatgcggcaggtttaatcaaaaagaaagttacagatactgacgataacgtaaaaataaatggaagcgccgctgtgcgggctttttgcccgcggcggtcgcaaaatgaaatgagcgtcatatactggggaacagatagacgtttgttggaggtacgattatgactgtttatcattttgttggaataaaagggacaggtatgagcccgcttgctcaaatcctgcatgatacagggtatcaggtgcagggatcggatatcgagaagcagattttcactcaggctgcccttgaaaaaagaaatatcccgatctatccgttcagcgccgataacatcaaacccggcttaacggtaatcgccggaaacgcattccctgattctcatccggaaatcgcaaaggcgctcgctgaagggattcctgtcatcagatatcataaatttttagctgaatatatgaaaaaatatacaagtgtcgcggtaacgggcgcacacggcaagacgtccacaacgggcctcttggcacacgtgatgcagcaggcgaagccgacttcgtttcttatcggggacggaacgggcagaggaaatgaaagcagcgaatactttgtatttgaagcttgcgagtaccgccgtcatttcttaagctatcagcctgattatgcgattatgacgaatattgattttgaccaccctgattatttcgccaacattgacgatgtgtttgatgctttccaaaacatggcgcttcaagtcaacaaaggcatcattgcctgcggtgatgacgagtacctgccgaaaattcacgccaatgtgcctgtcgtttattacggcacgggagaagaaaacgattttcaagcgagaaacatcgtaaaaaatacggaaggcacgacatttgacgtctttgtccgcaatacgttttacgatacgttctacatcccggcatacggccatcacaatgtcctcaattccttagcggtcattgcgctctgccactatgaagagatagacgtgaacatgattaagctcggacttgaatcattcggcggcgtcaaacgcagattcaatgaaaaagtgatcggcagccaggtgctgatcgacgactacgcccaccatccgactgaaatcaaagtcacgattgaggcggcgcgccaaaaatatcccgaacgtgaaatcatcgcggtatttcagccgcatacgtttacacggacgcaatcattcttggatgaattcgcagaaagcttaagcgcggccgatcgcgtgtatctgtgtgacattttcggttctgcccgcgagaacgtcggcaagctcacgatcacggatcttcaggaaaaaatcgataatgcagaactcattgaagaaaatgacacatccgtgttaaaagcgcatgaaggcgcagtgctgatcttcatgggcgccggagacattcaaaaatatatgagagcctatgaaaacgtcatagcgtaacgaaaaagcagtggggctctcactgcttttttgtgcgtgctgcaaagggatttaccgagaaacggagaaatagtatacatacagatctttcatatatgtttatcattttaagaattgggtatataccactatatcctgcattaaggaggtattagatgatcatcattctttacttaagcgtcgcactcattgccgttgcatttctcatcctcgtcatctatctgtccaaaacattaaagtccgtgcagatgaccttaacaaacgtagcatcgactttagacggccttgaagggcagatgaaaggcattaccgcagagacaaccgagctgttacataagacaaaccgtctcgcggaagacattcaggaaaaatcagagaaattaaatacggttgtccatgctgtccaggaagtgggaacttccgtccagcagtttaatacatccataaagcaggcagcaggttccgttacggcctctgtaagagagaatcaggataagatcagtcaggttgtcacctggagccaggccgctatggaaatatgggacaagtggaagcaaaagaaaaaaacatcgctttaatcataagaaaaatccactaaggaggaatcataatgagcaaagatggaatcaatagtaaggattttttaatcggaacgctgatcgggggaattatcggcgcgacaacggcgttgtttctggcgcctaaatcaggtaaggagctgcgcgacgatctcggcagtcaggcttctgcgttaaaggataagacggacagaatgacggccgacgcgaaagaaaaaggctctcaatatgtcagcatcgccaaggacaaaacatctaatatcacccagctggtagctgatcagtcaggccagattatgaataaagtgaaggatttaaaagaccgttctaagagcacactaaccgagaaagccgaagagacgagaagcgaaatgcaggacacggcccaaagcatcaaggccgaagcggaagacgccggggaaaaagccggtcaggcaaatcgctgatcttcaataaggagagataaccgacatgacaaaacagctgatatcgtctgaagaagagttcaaaaatgccgctgagaaagaaaacacgctcgtgtttttgaaacacagcacaacctgcccgatcagccaagccgcgtttcaggagtttgacgcctttgcatcggcgcattcggaagtgccttcttattacctgcaggtgcaggacagccggccgctttcaaactatatcgccgagacatacggcgtgaaacatgaaagtccgcaagtattcgtcattgcaaacggcgaagtgaaatggcacgcgtctcattcacaaatcacaaaaaacgcaatagagcagcacctttcataattgctggccgccggttgataccggcggttttttttttgaaaaaaactattgatcatttcagccggatcatgtaggatatcaatatataccgcttcaacgcataaaagcttaaaagcgtttttgtgataaagccgaatgtgaaaaaatttattatttcatattcctattttcgcataactgtagtaagatgcatgttaaccattaaaataaaacatagcatagaagggatgaaaaagatgagcaacaaggaattagagagcctaagacagcaggcagacgcactaaacttagaaatccttaaattaattaatgaacgcggagccgttgtaaaagaaatcggtaaagcaaaggaagcacagggtgtcaaccgatttgaccctgtcagagagcgtacaatgcttaaccgcataattgaaagcaatgacggcccatttgaaaactcaacgatccagcatattttcaaagaaattttcaaagccggacttgaacttcaagaagaggaccacagcaaagcgttgctcgtctcccggaagaaaaaagcagaagatacgatcgttgacataaaaggtgaaaaaatcggtgacggcgatcagagattcatcgtcggaccttgtgccgtagaaagctatgagcaggttgccgaagtagcggccgcagcgaaaaaacaaggcattaaaatcctgcgcgggggcgcgtttaaaccccgcacaagtccgtatgatttccaaggtctcggcgtagaaggcctgcaaattcttaaacgcgtcgctgatgaatatgacctcgcggtgatcagtgaaatcgtaacgcccgcacacattgagcaagcgattgattacattgacgtcattcagatcggcgcgcggaacatgcaaaactttgaattgctgaaagcggccggctccgttaaaaagccggtattgttaaaacgcggtcttgccgcaacaatttcagagttcatcaatgcagctgaatacatcatgtcacaaggaaacgaccaaatcattctttgtgagcgcggaatcagaacgtacgaaacggcaacgagaaacacactcgacatttctgccgtgccgattttgaaacaggaaactcacttgccggtgtttgttgacgtcacacactcaacaggccgccgcgatctcctgcttccgacagcaaaagcggcgcttgcgatcggcgctgacggcgtgatggccgaagttcaccctgatccttccgttgccctttcagactctgcgcagcagatggatatacctgaattcgagaaatggctgaacgaattaaagccaatgctgaaagtaaaagcataatacaacgttccgctctttaaaggccgcctcgcgcggcttttttttcgtatcttcattttatttaattataaaatgaaagtgaacgttttcatcactgggaaaaacgtgtataatttcatgagagatatttaaatttgatgaataatgaaaaataatgtacactactgacttacgcttacaatcataaacgacagaatgcgaaatcgtacgacatttctttacataaagtgtttatgctatagataaggataagtgtatccagtaaaaggagtggtttcagtgagcaacattacgatatacgatgtggccagagaagcaaatgtcagtatggcgactgtttcccgcgtcgtgaacggcaacccgaatgtaaaaccgacgaccagaaaaaaagtattggaagccattgaccggctcggctaccgcccgaacgcggtggcaagagggcttgcaagcaaaaaaacgacaacggtcggcgtcatcatccctgatatctcaagcattttctactctgaacttgcgcgtggaattgaagatatcgcgacgatgtacaaatataatattatattaagcaactcggaccaaaatcttgagaaagaactgcatctgttaaatacgatgcttggcaaacaagtggacggtatcgtatttatgggcggcaacattacggacgagcatgtcgaagaatttaagcgctctcctgtgccgatcgtcttggcggcatcagtggaagaacagggcgagacgccttctgtcgccattgattatgaacaggcgatttatgatgccgttaagcttttcattgataaagggcatcgcgatattgcattcgtctccggaccgatgcaagagccgatcaaccgttcgaaaaaactgcaagggtacaaactggcgcttgaagaagcggcgattccgtttaacgagcaattcgtagcggaaggcgattacacctatgattccggtatggaggcgcttcaaagcttgatgggccttgaccggaaaccgacggcgattctttctgcgacggatgaaatggccctcggcattatccatgcggcccaagatcaaggtctttcgattcctgatgatcttgatattatcggttttgacaatacgagattgagcctgatggtccgccctcagctttcaacagtcgtgcagcctacgtacgatatcggcgccgtggcgatgagacttttgacaaaactgatgaacaaagagccggttgaagagcatatcgtcgaattgcctcaccgcatcgaattaagacaatcaaccaagtcataaaaaaacggaaaagcaagcttcactctgaggggtggaatcttgcttttttacttgagtaaggagaagatatgaaacgttttgattatctgacgcccgttggctttatgttaggctgtattattgtcgcaatcggtattctgtcagggacgggactggcgggaatcagttcatttttagatttgacttcttttttaatcgtcacaggcggccttgctgcggcgatctttatcagttttccgccgagggatttaaagaaaaccccttctgttctgaaacaggtattctcccgtcaggatgacaatgtgaaagagcttgtcagagtatttgtcagcctttcggagcaggcgcgcaggcaggggcttctgtctctggatgaccaggcgcgtgagatcaaggatccgtttttaaaaaaagggcttttgcttgcaattgacggctgggacgaggaaacgatccggctggtgatggattctgagatcgccgcgatggaagaaagacacagaaaaggaagacgcgtttttgaaaaagccggtgatttcgcacccgcctggggaatgatcgggacgctcgtcgggctcgttctcatgctcaaaaacttaaatgacccgcataccctcggaccgaacatggccgttgcgctattgacgacgctgtacggagcgctgcttgccaacttggtgtttatcccaatcgcggcaaagcttgaagaaaaaacggaaagtgaaattttcatcaaacaggtcatgatcgaaggggttgtcggcatccaatcgggcaaaaatccccgcaatctcgaaagtcagctcgttgtcttcagctcaagagaagactggcgtaaaggacagcctgcgaacaagaaaaagggcgctgtccatgaagcttagaaaagagcgttttgaaagaagaaacaaatcggaacattccggcggttcaccgagatggatggtgacgttcgctgacttgatcacgctcattctcgtgttctttatattgcttttttcgatgtcgcaaatagacgcggaaaaatttcaatctgccgtttcatcgattcatacaaacggcagcgggggtgaatcggcgtcatcagacaaagcaaacgaaaataaagaacaggatttgctgttacaaaacgtgaagacatacataaaagcgcatcatttgagttcgaaattgacggcgaagcgcgatgagcgcggagtggttcttgtgctgcaggaggccgttctgtttcagacaggaaaagcggatgtgctgaaaaacgccgagccggttctgcatcagatcgcggtgcttttaaagacaattccgaatgacatacaggtagaaggccatacggacagccgccggatttccacctatcaatttccgtcaaattgggagctgtcgtctgcaagagcggcgagtgtgatccggtattttaccgcgaatgaagacttttccgccaaacggtttatctctgccgggtatgcggatacgaaacctatgaaggacaacaaaagtcccggacatatgaaagaaaaccgccgtgtagaaattgtgatcaaaaaaacgacctcctcataaggtcgttttttattttgttttataccgctgctcagaccggatggcaaaaagtgctttttccacggtttgggcatttttttctgaaatttcttctttgcggggaatcggaggatataattgttcaggatcactccaaaaagcgggcaacgtgcatggggagtgcttttgccatttatcgatccatttctgcggtatgcactccccgggatcaatccctttcatctcaagccaaatgcggctccatgctctcgggacgactctccaaatatcgtatccgccgccgccgaccgcgatccatctgccgctgcaatattgatgggctaatgaatgagcgagccgcgggatctcctgataaatggagattgtattggacaggtgtgtcaatgggtcgtaataatgggcgtctgcaccgttttgggtaagaatcacatccggcttaaaaaaagccgcgatttctgaggcggccgtattgtaagcgtgaagaaaggaatcgtcctctgtgaaagcatccagcggaatgttaaaagaatagccgtagccttgcccgcttcctttttccagtacctgtcccgtcccgggaaataaataacgcccggtctcgtgaaaagaaacagtgcagacatcagacctgtcgtaaaacgtaaattgaacgccgtcgccgtgatgggcgtctgtatcaatgtataacacttttgccccgtagttcttctggatgtattggatggccacggcgctgtcattatagatacaaaagcctgaggctctgccgcggaagccgtggtgaaggccgcctcctaaattgcaggcgtgcctggcttgtcccgtcatgacataatcagccgctgttaaggtgccgcccaccagaagtgacgcggcttcatgcatgccggcaaaaacgggggtgtcttccgttccgagaccgtagctttctccttctgcggcagggagccggcccgcacccgctagttccaccgcctgtatataatcctccgtatgaacgagagccagctcttctttagcggccgtgcgcggagtgacgatgtctccctcgtcaaacgcgtccgccgcctgaagcagatcgtatgttaaaagcacgcgctgctgattgaacggatgatcctgatgaaattgatacgtctgataagaaggcgagtaaacaaaaacgctgtctctcatggctgatccctcaaatgtttcggccataagacattgtatccggcttcttgaacggcacggataaaagggagcggattcatcgtcttcacccggaagacgagaatgttcgacccggcggaatcatggggatagacgagcacactcaggatttgcagctgaagatcacggcacatgcagctgagatcagcaaggctttttgtcatatccgtcaccaggatttccacctgtgatcccggctgggccgcgcctgtcaggctgacgaaagtccggagcacgtcagttttcgttaaaatgcccgtcagcttatggtttaccgtaatcggcagacagccgatgccgtgctcataaaaggaagcggatatttcttccacaaagtcaagcggatgagcgcagatgacattccgcttcataatggtctccactttgtttgtcagaaacacgccgcgttccttttgttcaaagctgccggggccggcctgtttaatgtctctgtctgtgacaataccgatgacgtgcagctcgtcgtcgatgacagggagatggcggatatgatatgccttcattttacggacggctgtttcaatggagtcgtgttttgagacggtgatgacgtcccgtttcatgatttgttctgcaatcatctttttatcccctttgtatgtcagtcaatacataaatcgctgataaaaacgaagcctgtcgaactgttcaattgactcctgactgacgtgcctgccgatgcgggccatcagacaattggccggatgagagctgatttccggttcatccgttgcgaaccagacaagacccccggcattcatcatcttttccatgatctttctgtattcccacacatcttttttcattccttttaaatcccaatgccagtaatattccgtcgtcatgatgatgtaccgttccatctgttcatccatcatgctgactgtcagcagcgtttttccgacagaacagcccctgtagccgggagcgacctcgatcgccccgagttcaaggaggtcttccatatttccgtcagaccaccgttcaagcggatcaggatataaatacgtcacatagccgataatcgtctgtccgtccctggcgataatgatccgaccttcaggaagcccggcgatctcgattaacgctttgtgctgttcatgaggaaggcgaaaggctgtcaggccttcatgaaactcatactgtgctaggtcctctggaggtacgggcccttctactaaaagagggccggctgctgtctgaattgatgaagaatggtacgttttatgatgtttcactgattcaccgcctgtcggttcttaataaaaacacatctcttttaagcataacaaaatataaagcgttttcaatagtgttgtaatttatattttaaaaattgagaaaactgtgaacatctactataattagtctatagataagcaaagggggatgttgcatgaatttgaaagcgttgccggcggaaaaggggaattatcatctgcgaaattatgaggaaacgtaccgcagcttcgattggaaagaggtcgaagcggagttttcctggcatcagacgggaaagctgaatgccgcgtatgaagcgattgaccgtcatgccgaatcatttcgaaaaaacaaagtagcgctgtattacaaggacgcgaaccgggatgaaaaatacacatttaaagaaatgatggaggaatcgaaccgggcgggaaatgtactgagacggtatggaaacgtggaaaaaggggaccgcgtttttattttcatgccgcgttcgccggagctttactttatcatgctcggcgcaattaaaatcggtgcgatcgccggccctttatttgaagcgtttatggaaggcgccgtcaaagaccgcctcttgaacagccaggcgagggttgtcgtgacgacacctgaactggccggacggattccggcggacagcctgcccgacctcgagcatattttcattgtcggcggcagcaaagaagcgggagataaaatcatccattatgataaagcggctgagggagaaagcacgagacttgatattgaatggatggacagaagagacggctacctgcttcactacacatcaggatctaccggaacgcccaaaggtgtgctccacgttcatgaagccatgattcagcaataccagaccggcaagtgggtgcttgatcttaaagaagacgatatttactggtgcactgcggacccgggctgggtgaccgggacggtgtacgggatatttgcgccgtggctgaacggagcggcgaatgtgatcgtcggcggcagattcagtccggaaaactggtacggcacgattgagaagctcggtgtcagcgtctggtacagcgctccgacggctttcagaatgcttatgggggccggagatgaaatggcatccaaatttgaccttacttcacttcgtcacgtcctgagtgtcggagaacctttgaaccccgaggtcatcaagtggggacataaagtattcggcaagcgcatccacgacacgtggtggatgacagaaacgggcggacagctcatctgcaattatccttgcatggagatcaagccgggttcaatgggaaaaccgattccgggagtggaagcggcgatcgttgacaatcagggaaatgagcttccgccgtaccgaatgggaaatctcgccattaaaaagggctggccgtcgatgatggattccatttggaacaacaaagagaaatatgattcttatttcatgccgggcggctggtatgtttccggagattctgcttatatggatgaagacggttatttctggttccaaggcagagtcgatgatgtcatcatgacatccggcgagcgcgtcggcccgtttgaagtcgaaagcaaacttgttgaacatccggcgattgccgaagccggcgtcatcggaaagccggaccctgtccggggagaaattattaaagcgtttatcgcgctcagagaagggcatgagccatccgatcagctgaaggaggacattcgcctctttgtaaaacaggggcttgccgcgcatgcagcaccgcgggaaattgaattcaaagataaacttccgaaaacaaggagcggaaagattatgagacgtgtgctgaaggcgtgggagctgaacctgccggcaggcgacctgtccacaatggaagattaaagacggcgttgacatcgtatcttatttatgttaaaaatgagtaagcttcatacgaaaaggttttgattgagacaagtagggtatctgattgttcaagagagctgatggccggtgaaaatcagcacataagatatgccgaatacactcatgaaccgcttttgcgaacaaagcccttccaaggctttcagtagtgaaagaacggacacggtccgttatcaaaaagagtgataaaagcttttttatgcttttattagtagggtggtaccgcgattatatcgtcccttcgttttaaacgaaggggcgttttttattttcataaacaaaggagcagacaaaatgactaacttattagaggatttatcattccgcggcttaatccagcaaatgacggatgaagaaggactgaataaacagctgaacgaagaaaaaatccgtttatactcagggtttgacccgacggctgacagcctgcacatcggacaccttctgccgatattgacactgcgccgtttccagcttgcaggccaccatccgattgcgcttgtaggcggcgcgacgggactgatcggcgatccgagcggcaaaaaagcggaacgtacgttaaatactcaggatatcgttgtcgaatggtcgcaaaaaattaaaaatcagctttcccgatttttagatttcgaggccggagaaaaccccgctgtcatagcgaacaactttgactggatcggaaagctgagcatcattgaatttctccgcgacgtcggaaagaacttcggaattaactacatgcttgcgaaagatactgtaagctcaaggattgaaaccggaatttcttacacggaattcagctacatgatcctgcaatcctacgattttctgaatctgtacagagaaaagaactgcaaactccaaatcggaggcagtgaccagtggggcaacatcacggccggtcttgaactgatcagaaaatctgaagaagaaggggcgaaagctttcggtcttaccattccgctcgtcacaaaagctgacggcacgaagttcggcaaaacggaaggcggagccatttggcttgataaagaaaaaacatcgccgtacgaattctaccagttctggatcaatacagatgaccgcgacgtcgtcaaatacttaaaatacttcactttcttatcaaaagaggaaattgaagcttatgctgaaaaaacggagacggctcctgagaaaagagaagcgcagaaacgtctcgctgaagaggtgactgttcttgtacacggccgcgaagcgcttgagcaggccgttcatatctcccaggcgctgttcagcggcaatattaaagagctttctgctcaagacgtcaaggtaggatttaaagatgtaccttcgtttgaaaaagaccgctctgaagaactgtctttagtagacgtgcttgtggaatctaaattgtcgccttcaaaacggcaggcccgcgaagacattcaaaacggagctgtttacattaacggcgagcgccagacggacatcgggcatcttctgactgcggaagaccgcattgaagatcaatttaccgtactgcgccgcggaaagaaaaaatacttcctgatcacgtactgaaaataaaaagcagtccggccgctcaatgcggcaggctgcttttttatgttttgtgaatactgcacggggaaatgagtacagtacatagtataagcaaaacagggaaggggtgctgcgccgtgaatttcatgtttaccattgcaaaagaaagattgcagcgggatcattgggaacagcagcaaagcataaacgccgaagccaaagccgaggaatcagagacggaagaagaaaatccgacatcataaagggaaagcctccattctgcggaatggaggcttttgattgtcaccatatcagcctgacggcggccatcagcacgactcctgtgatgaccgtgatggataagctttttgtccgcattgcgcaaagcaatgtcgggatgagaacgatcatggcttgccaatcaaaggtcaaagcgctgtttgttttcacaatcatgctttccgttaccagagccgtcaaaatgcaaagcggaataaaggagagccattttaaagccaattcaggcatctgaatgttccggacaaatataaacggaacaatgcgcggcacgagcgtaacaatcatgcagccgagtataatccagatcatttgtgtgctgatgctcatttgtccgtcaccaccccgatcgttgccacaatcacggttgaggcgatgaccgcgatgtgtgacgggacgaaatacgataacaagaccataaaaatgatcatatagagaattaaggagaggctgtgcttcagcttttccgaagcggacgactgcaattgcagcacaagcagcgccgcaaacatagcgggcaaagcaaagtccaggccgagcgcgtaaggatcagatatccattgtccgagaagcccgcccatcacgcaggaaataacccagcacatgtaagcggttatattgaggccgttcatccacttatcgtataacctgccgttctgagccgctttgttcaccgctaccccgaaagattcgtcagtaagcaaagccccgaagccgatatttttcagcaaagagtatttcgtgaaataaggcgcgatggtcaggctcagcagaaggtgccgcagattgacgataaacgtcgttaaaataatggcggaaatcggactcccggaaacaaggagtgagcaaataataaattgggcggcgccggcatagacacacaaggataacaaacaaatttcaagaatgcttagatgagaggcaacgccaacgatgccgaaagcaaaaccgatgctcatatagcccagcagcgtaggcacacaatcccgcaccccctgtaaaaacgtatcgttcatttcccgggaaacggcggttttttgcacttctgtgttaatcattttttatactcctttcatagagattataatgataacgactaatgaaaaaatcaaagaaaatacggttcacatttatatgaaccgatttccggtgacgacatgaaataacgaatggttttgtttcatcaggccttcaactttctcagcccctacttctttcacaagctccgcgaacatcagatcgtgcctcatatattccatagccacgagaacgagagcgggatcttctgatttaatggcccaggcattcgtctgcggagaaaaattggcgattaagacttctttattatctcgggcagctatcgttaatcttccgcccatccgtttctccgccacttcaggagacatattatgatgtgtcgtatttccgagcttcacttccggagggccgaacacaatcgaaaagacgggcaatttttcggcggcgcgtttgttagcggcttcttgaataaagggaatctgctgttcccagacagacagccacaactcttcctcggctttttcaatcatatccttcatctcattgatgacatgatcattcgtgctgatgcggcggatgacattcatctcctgctcgctttccagtgccaataacttttcctcaaggtagccgaatgaactctcgaaatcgtgccggagccggtcgattaattcctttccggccagcggggcatatgtaaccggatcagacggcacaatatggacagcgcctttatcaactaatttccccaatacttcatagatcattgagcgggggacgcctgaccttttgctgatttcatatccggtaacaggcgagtgtttcaacaagccgatatatgctttacattcatattgagaaaatccaaatttctgtaattctttcagaacatcctccataaacatcctccgtagtggttattcatgaaactactataatgtaagcggttatatcttgtcaatgggacttgagtgctgaaagaaagttgcacctgttttgtcgctttccaacttagtttatggccagttacatgtatggcttttgtgaaaaacgttgccgtagacccacacgaatgccgtttgatacgataaattcaagaagttaaaaagaggaggatcacggtggaaaacacctctaaaatcgcttttttatcggttataagcaattccctggtcgtcatgctcaaaatagtggtggggataataaccggatctgtcgcgatactttctgaagctattcattcttttttagatttgatcgccgccttcatcgcctttatctccgtcaagatttcaaaaaagccggctgatacagggcatccgtacggtcatggaaaagtcgagaatctgtcggggactatcgagacgattctgatttttgcggcagggatttggatgatatatgaatgcgttcaaaaactggtcaaccccgcgccggttcatctgcctgtattgggaattgttgtgatgcttgcgggggctctcattaatttgatcgtttcgaagttcgtaaaaagagaagccgaaaaggttaattccgtggcaatgaaatcaaatgccctgcatttactgactgacgtgtacacatcattaggcgtagcggcaagccttttggtcgttaccttaacggagtggtacatacttgatcccattataggtatggtgctggcggtgtatatcatatatgaagcgtttaagttaatgaaagaagcattcccgccgctgattgatacccgtttgtcggaagaggaagaaaaaacaattttaaagattattgaaacatttcaacaggaatttattgaaattcatgattttcgtacaagacgctccggcccgcaggagtatattgattttcacctggtcgtagcatctcacgtgacgattaaagacgtgcacgacctgtgtgaccgcattgaaagagatattacgaatgaattcaaacaagcacaggtaatgattcaccccgagccggagagcgagaggaagaaataaatcgatcttatgtttgcgtttgttcccggcaaaatgtcttctttacagaaaggcccgtctacacgggtctttttgttgtgtaaatgaccatttctcgctcatatgagagagaagcttatacacgtgaggggttcatttcatacgttatgttgtaaagaaaaagggaggtgaacagaattgaacgctatttctgttaaagaaattgaacatggagttgccgttgcggaaagagaaggtttaggggagtatttataccaagaaccggtttctaaaaaatgttcgcgccgttcccgcagcagaaaacggacacaccgttctcgcagcagaagacggagccatcaccggacacaccgctcccgcagcagaagacggacgcatcaccggacacaccgctcccgcagcagaagacggacgcatcaccggacacaccgttcccgcagcagaagacggacgcatcaccggacacaccgttcccgcagcagacggtcccatcaaaaacgtacccgcaaacgctgttttaaatgctgactgcagactctgttacaagtaacggggatctgctataatggcaagagaactgcataaaagatccggtattcatcatctgcggacactgaactgacaacatggcgctgtttgttcgtgtccgttttttatgtcaaaaaagatgccggaggataaaaaggaagggatgacgccgaatgaagctgaatgaggatttttataactctgcaggaaagacagtctctttgccaaacataagcagcaagcttttgcatatcacggacagcgggcatatcagcgttgacttcatcagcataagcaggctgcggaaggcttcaaaaatcgcgatcttaggtgacagcgtcgctcgggggctgcgtgcggaatacggctttggtgacattctgaaagaccggacaaacgctaaaataaccaatctgtctgtcagcggcgttaatatgagcaacaacggaagcgataacatttatcagcaggcgcttaaaacaaagggacatgatgtcatcattgtccagggaacagatgatgattggtgcaaccacattcccatcggcacagatgaaaaggatatcaccacattttacggaggcttctgccaagtgatccagcagctgcggagcggaaataaaggcgcgagcatcattgtggtgaccccaacgagacaagcaaaaatatcaaaaggaaaaatcgtccgccgtgatactgataaaaataaactgggcctgaagctggctgactatgtgaaagcccaaaaagaagcctgcacactcctctctgtcccgtatgccgatctgtttgataccgatctcatcgacccgtataatcccgctttccgcagcatgtgcatgtcagaaggtcttcatccgaacgagaaagggcatcaaatcatatttcaggaaatctgccggaattattattactattatgggtaacacagcgctaacaaattattttcggctttgcttttctaaaagctcaattattctttgagatgcgtgtttttgcgctctcaaaagcgagacgatattaccggtaaaaccgattaaaatgataagcagcaaaatgatcatccacataagtgaacctcccgtcgggttttaaaacatcctctctttattttacttattatggatgggccggagaataggtctaaacgaacggtgtttctttaagagtccataaaaaagcacagactgaacgggtctgtgcttttttctcttatttcagcaggttcaatgattcacgattaaaggcttccaaatcgtcaggtgttctgctcgttacgatgttatggctcacgacgacttcttcatctttataatgtgcgccggcattgattaagtctttgcggatgctgcggaatcccgtgatatcttttcctttaagaaggtcggtatcaatcagcagctgcgggccgtggcagattgcgaaaacgggtttctgattttccacgaatgctttagtgaattcacccgggcggtcatctccgcgcagaagatccggtgaaaagcctccgggaatcaataacgcatcgaattccttggcgtctgcgtctgagatcgcttgatcgatctttactttctcaccgtgcttgcccgtcacttctttccctgcttccaaatctattgtcaccacactgtggcccgcttctttaaatgcttccgccgggcttgtatattcaatatcctcaaattgatctgtcatcagaactgcgatttttttgctcatacatcatgcctcctgtgaatttgtatatgacaagaatatcaggcagattcccgcctcacaacgtatttgcttatgaaaaaagactcctctgaaaaagaagagccaaaaggtacggaggtctgctgaaacttacgtgtttaacctgagataaggcaagaaatcgaaccaattactttttgtgtctttttttattctttttacacccgcatttccccggatctcccggatcaatgacttcgtgaattgtttcttcctgataaacgtggcggggaacataacggatatgctctctgttaatgtgtttgatgggatggacgtaaaccacttctttgtcagtatacttgtcagtcacaatatacttagggtcacagtaatacactttcgattttttacccattcatctcacctcccgtactttattaaatgctgacaaggaggattttgcatcggacaagtacaccgtggcaagtccacaatttttcatatgcaatttcgtttttctggtttttcctgaatccgcctcaaattggaacggttaaccctttttgagcggggaaatctataaaaaagaattcaaaaacgattcttttctcaggtcaatcgagatgcatacatctttagggggatttcagaatgctcgatgaaaaaacgattgaaatcattaaaagcacagtgccggtcttagaagagcatggtgaagaaatcacaggccgattttatgacctgctgtttcagcatcaccctgagctgctgaatatctttaatcagacaaatcaaaagaaaaaaacacagcgtacggccttgtcgaatgctgtgatcgcggccgcagccaatattgaccggctggaaaacatagtccccgtcgtcaaacaaatcagccataagcaccggagtatcggtgttaagcccgagcattacccaatcgttggaaagtacttgttaatcgcgataaaggatgtgctaaaagacggggccgctcctgaggtcattcaggcatgggaaaaagcatacggcgtcattgcagacgcttttatcggaattgagaaggacatgtatgaacaagcggaaacgcaaaaaggcggctggaaagactataaagcgtttacaattgataaaaaggtaaaagaaagcaaggagataacgtcgttttatttaaaaccggaagacggacaagttctccccgaattcaaagcagggcagtatatcagtgtaaaagtatacattccggacacgggctatacgcatatccgccagtacagcttatccgacgtgtccggtaaggattattaccggatttccgttaaaaaagaaggggttgtttcctcatatctgcatgaccaattacacgaaaaggattcaattgagatcagcgctccggccggggatttcgtattagaccctgattccaaaaagaatcttgttctcatcagtgccggtgtcggaattactccgatgatcagcatgttaaagacggttgccaaaactcagccgcagcgaaacgttctctttatccatgcggcaaggagcggagagtatcatgcgttgcggcatgaagctgaagaagccgcggaacactcatccgttgacaccctctttatttacagcgagccgtccgaacaagaccgttcagaaaacattcgttttcgggaaggccggattgacaaacagctgttagaagaagtgatgacagataaagatgctgatttttacctgtgcggatcaccgtcgttcattaaagaaatgaaaaagctgatatctgaattcaatacaccgccggaatccattcactatgaattatttgaaccccagctgagtatggtgtgacggaagaaggaaggccgattttaagcacccgaattgggtgcttttttattctcttgcgaggaaagtttgctgctcaacattttatgttaagcttgcttaattaatgaaataaaagacacatggctcgcgcatcaaagagtacgggctttttgtcaaccgggagcggcaatttgacgattagagaatggtatgaggcagcgcttcgatacaattattactcacagttattactcacttatcctgctgatcgaatttttggtgtgcgagaaaaaaacggtgcggctgcaggattcggaagaggtgctgaatttttatttacaagagaaatttaaagacgggatgaacgcttatttgttggtatacgaacaacggatttaaaggaggaaacagtatgagattaatcagtttagatcatataaagagataaacttgtcatagacacgacacagtacggttactttgcggttattctatccaatggagctgcaaggatggctccgctccccacatacagggaaacaaagataattacaaatcatggcaaggtcacccgcgttaaaagggacgaaggctatttcttctatgcatactgcacatggctttttttctgataataagacgctccctatttccacgctatctcctcctcagcgccaacaggctttccgtcttggacttgtatccaattaaacaattctggaaagcaggatgagtccctatttctttgtgattccttaatataaaaacaatatctcgcaatagcaagcaataggaacgataattaaattggattgcagcatactatccgataaatctccgtcaaacagactggacagaaagcaccaaaaagaatatttgcacacagaatactcctctttttacatcataatagatagtattcaataatccatctctaatttgttttttagacaaaaaagaagaaccagtcacgcatcagcaactcgttcaatttttgttaggatcagaatgattttaagtactgttgtacttcagtttccccttgcttattaaattctcatttctggcttcagccgcttaggcattattaagaaaagtaaaactcaaaactgatgttactaaaagactcaatgcgattttttcatttgtttctccttttttggaattgtggtactattatcctgtaattactttaaaaggacaagtcaatgcgttttttggaggttgtttatgacgaacgagtataaaaagcccattttatttacagtttctgcattggtgatcattttcctagtgtttttctcattaaaaatctataactattacaatctcgaatatcctaactgggaaggtaaaagtaaggatcacaactgggaagtagtctttaaaaagaatgaagatactccaaaagagtttagcggggagattctttggattggcgataaagataaaactgataaaacttatatagaatccataacaataatgaaagataataaagcacttcttgattcttcagattttaacagcgatatccctatgaaggattattcaggtggtacgtttagcgatggatcagctaaagaaaaatcattttcatttttagaacgcttagaagaatctgatctaaaaggatctaagataacggttcaagtgaaatggaaacaagataaccaatcattcagtacggaaaagttcattctttcaaataaaactatatttaatcactaaatttattgagtttattgtaaccagttcttaatctgaactgggagaagatttaattaaataagtccaagacagcaagcctttggactatgatcattgtacagaattactgtgctctgattggtgtccgttttttgtttttgggaagcatcgataaagaagtgctgaatattgcgtagggttcaatctgagggcttttccccaaaagtgggggagtcggggaattggcaaaggatgaaacgagctaggagcggcatatttaaggagaaataacagaaggaaacatatgcaagatttaatcattgaatataaaagcgcattgaaacatgttaaaaagatgtaccggcagttatgggcggttgctgacagtctcttaaccgctgaacaaaacagcgataaaaagattattggcggcatgataagcgacattgaatacaatcgaatggctgcagaacggaagacaacccggcgcccaccgtggtgctgatcgcagggatgcgtataaaagaacgatcctttctgatccgcgtttaattgatgcgctgccggaagaatatgcaatcgttcaggaccctgatggagaggcaagcgattggaacagggaaagaatagcgatctttatctgtactgacagaccccgagaaagatatttttatcatgcacgctgtgcaaaatatgtttatgaagaaatagctgctttactcaatataaaaaaaggaaccgtccaaaagaatattgaacgatccctcttaaaaatgaaaaatagagcaaatgacagcctttttgtttagcttaacaggctgtcttttttatgatgatcttttattaatgccaagccgctcacgtaatgcaaattgaagaagctgcgaaaagttgacaccttctttttctgctgcttccgccagccatttaggtacagtaagtgtctttttcactgctttgttttccatttcatcacggacaatatctgtccaggcgcttaccataacaacaaaaccggttgccggcactttgatatattttggagcggagggggaagggatgtcttcgccgccttcttccatgccatatagaaagccttcgagcgcatcttttgccatgctcatagcatcatccacgttctcgccttctgaaatgcagccgggtaaatcgggaaaggtaattgtgtagccgtcgcttccgttttctcctgcatcaaaaatcgccggaaataaatactttgccatatatataaaacctccttacaagggggttgtttaagtatagaatttagtgtgctgggtttgaagtcttttttggatgtgggactgttaccgtgcccggtttggttggatgtttaaagtgatgatgattaccaacaacccgctttaaataccacccatcttttgtaagtatctttatgatatctcttgaagacttcatgtttccctcccttcatatatattacaacacgtattaattacacgtgccaatacttattttagaaaaaagcattttttgtcttacggttgagactaatttatgaaaagaacttttgttcgacaaatttcgcaagtagttgcattgtcactctcttttgccgataaaagggattgaggtgataatatgcaaaacaattctttgatggaaacaaaagcaatagtgaaatacctagaaaaaagatacgggaaaccatacaaagaaaacttgaccattcaacagatttttaaagaagcattgaaaagagatcacagtaaagaccaattgaaactgatggttaatagattagattcgaatctcagtgtttcaaatgatttaagttctctcaaaactattccttttacaatacttacatcagttactgccggaataattagtatctttgtcgttatgttcactttctatttcaatactactaatagtttttccaacactatgttacaaaaggataaagaaaataagataaatcctggagacatccttaatgctattgttgaaggtggagagaaaatagcttcgtcactaatatatttcagcatctttacgcttgttcttatggttgggttgtggatttttattacaattgtaagtaagaaatattatcaacagctgcggggttttaagttgttattagacgaggtaatggaagagttaaaagaagttaaagataagcattgaacagtttgcatcattctacgggatggtgcttttttatattctctttaaactgcttccggtaaatctcagaaatactactggcggttaacggtctgagtacgggggcagtttagaaagaatatgattggagggatcacatgaaaacaattagtcaagccttttaggaattaggaaagaatctgaggtgtgcggctgaaaagatgccaacgcccaagccgcttttcatggaagcttttattatgttgagtaaaggagatagagcatggaaacaatttatgctcaatttgagacgttatgggttatttcgctcacgttcttctgcttgtcgtgtgtagtctgttcagataaatcagaaaaggaataagcatggcaaggcaacgtgacgaatatataatacagcacgctggaagcgagtaaggaaagtcgttctgataagggacggctatttgtgttgtgaggacgttgtcgtggattaataccgcaggcaaataccaacacatcaagagatgatccaagcgtggcatttaatcttgataatcataaaacgatctgtttaaagtgccacaacaggaggtacccggaaagaagcggcggggaaggaggaacaaacgattatacgtaagtaacacttatagcggaaaatatggaagggtttttctccataatagagaatttttagggaaggatattaaagcaggtaaatcatattcaaagtcgtattatcctaaaaagacaaagttttttatgtcccaacatacttcggtagccggctggaatggttcacttcctgatacttcaactggaacattggctcctgctcttgcgaataaaatagcaaagccgtatccagagataataaatactcacagcaaaaaaacaatgcctttactggctaaagcaaatttcccggttgtatctgtcgataaaagagcaactgggatagcagaactgatcgaggtacaccaaaatctattaaattcttggtggggtaaatattaataagtaagaggtggctcaatggcagtttttgttgaaaaaacgctccaaggtctaaaagaattaattgatgaaaaaggccgcttaaaaattttagggaatgaaggagcgcttttagaaacagaatgtactttctttaaaggtgcaacagatctggagattgagagttttgagaagaaaataaaagtatcacttcctgaagattataaaacctttttaaaattgcataacggagccagaatatttgatttgttgatttacggtgagaatgtgggtgggggtttgcatattcttaatgtagaagagattgaaaagtatatgcaaaatggttttttagagcctcagtttattcccgtcgcacatctgttagacggatgttatttgttaattgacaaaaccaaaatatccacagatccaaactatttatggttccgcggatttattgagtatgaaccaatgcaacttaattttgagatattcttagataggtatatcttgtctcaaggagcaaatttttgggagtggaatatctatactgctgaaaattattataggactcaccagggtgatgaggattaacctttcctacagttgggttggtccatttttactattagacttcgatttgaacttttaaaaataggtttaatttggaaggcgaaccgattaattggtgtatagaggatttataaaaagcgcagatactctgcgcttttttatttaagtattttcctaatcattcgcagcccgtttttggaagaaggataacggaaagcgaagtcgaagcggttcgtttgtttgacgacgctttttttgtgcgtaaacgtgttaaagctgtcaaatccgtgatagctgccgatgccgctttccccgacgccgccgaatggcaaatacggtgtcgcgacgtgcattaacgtatcattgacacagccgccgccaaacgacagattctctaaaacagttcgctcgattcctttgtttgttgtgaagagatacagggcgagcggctttgggcgcgattggactttctcaatgacttccccgatatcacggtatgtaaagagcggaagaattggcccgaaaatctcctcctgcatcactggagagtcatccctcacttgttcgagaatggtcggcgcaattttatgatgagcgggatcagattgtccgcctgtaagcgggacgccatcattcagaaagctgagcagccgctgatagtggcgttcactgacgattttgccgtactgcggattttgttcaggctgagggccgtaaaattcactgatcgcacgcttcatttcttctgtgagattcgtcttgatatcttggtggacaaataaataatccggtgcgatgcaggtttgccctgcatttgtaaatttcccgaagacgatgcgtttggcggcaagctgtatatcagcatccttatggacaatgcagggacttttgccgccgagctccaaggtaacgggaattaattgtttggcggcggcctccatgacgatttttcccacggcaacgcttccagtgaagaaaatatagtcaaagggctgctgtaataacacagtgctgacgtcgggcccgccctccgccatagcgacatagtcactcggaaaaacgctgctgatgagtttggaaagaacagcggaaaccgccggcgtgtattctgacggtttaagaacgactgtgtttccggccgcaatggctccaatcaagggtgaaagcgccagctgcaagggataattccaaggcgcaatcaccaaaacggttccatatggctcagggataatgatgcttttcgagcctaggtgagtcagaggcgttttgactcgtttcggtttgatccattttcccagccgcttcatcacaaaactgatttcctccagtacaattccgatttctgtcgtgtacgactcctgttcggatttgtggagatcctgatagagagcggctgttatatcggcttcttgtgttttgatggcttgtttcagcttttgcagcatgttcagtctcatttctagctgtctcgtatgccccgccgcaaaataggctttgtgcttgctgacgatagaggggatgctgttcatttcgtctctcctttttgtaaggtatggtgatttattatgtggaaagtttcttctgcttgtcaaatgggggtttctaatgtacatatagctgaaaagccagtaggcacataaaaaaagccccggacaggggcttttttaataaagagagggagcatctgcccattattctgacagcccaaaagaaaaaccccggaaacattgtcctcacaacatgtccggggtttaatccaatgctctttaaagagcgttttacttaacgggagtagaactcaacgataagcgcttcgttaatttccggagcaagctcagagcgctctggaagacgagtgaatgtaccttcaagcttttcagcgtcgaaagtaaggtactcaggaacgaagttgtttacttctacagattctttgatgatagaaaggtttcttgatttttcgcgaacaccgattgtttgaccaggttttacttggtaagacggaatgtcaacgcggcttccgtcaacaaggatgtgaccgtggttaactaattggcgagcttgacggcgagtgcgcgcaagaccgagcttgtacacaacgttatcaagacgtgcatctaaaagaatcatgaagttttcgccgtgtttaccagtcatttttgcagctttgtcaaacaatgtgcggaattgacgttcgtttacaccgtacatgtgacgaagtttttgcttttcttgcaattgcaaaccgtattctgatagttttttacgctgtcccggaccgtgggggcctggtgcgtaagggcgtttttctaattctttacctgtaccgctaagagagattcctaaacggcgagacagtttccaagatggacctgtatagcgagccataatgtgactcctcctttggttttattttgtggaaaataaaaaccgtctgttcgatccgaccgtgcacattttgttttcatgtatcctcgctccagcagcagagagttacacgatacaccttacagctaaggaacaaaatgcaaacacagaagctgaacaaaaaggctgcaatatttcacacaaagaacattatatgatttttccccgccgccgtcaaccatttctccatgaagagtgccggtttatgatataatgtacaaaaatgagtagtacatgtttaggtgataaaaatgaaaaaacaaacaattgatgaagtgacggcctttcatcagaaaatgctttcttttttcttaacgaaatctgaatccgtctcattatccgactcgctgttatggctggcctcagctctagaatcctgctttacatctctttcattgaccctttcaccggcagaatcaacacgtttcaccataaaaacagaagatgaaccgcattatgctccgctgaaagagagtgacggccgttttatgatcaggaatcagacgtccggcagatccttttatctgcgctcggaaggcgggctgccgatcccggaatcattgcctgagatcgttactcagtttattaatcaatctgtgagacaaagcgggctgtttgacaaaacgaagcatcagcggaaaattcacagaatgacagaaatgttccattcgcttttggaccaaaatgaggttttggaaaaactgcaggcaagtttgagtacggctttccggtctttccgtttttcactgtttatcacgcaggatcaggatacggacagacagcttcccgcaaaagaattacatatggacggaaaagatgccgatccgtctgcccagaaggtttatttatcggggagactgctcagaaaaggcaggtcatctgcttatctgccgatcaaaggccagcaggggacttacggggttctgaagacggaggggctgcaggatgccgttctttcgtgcagtactctcagtgaaatgctgctgcttgcgggcgcagcgggaaaagcatttgaaaatgcgcagctctatgagcaatcgaaaaaaagcattgcgaatctggagctcattaatgaaacatcgcgccagctgaatcagcgcctcagacttactgatacgatgcgggagctcgccgccattatgacccaatcgtttcatgcggaagaagtggctttttttcatattgatcattttgagacgcaaaatctgcttccgggacataccgctttttttaagacagaacgtgcgaacccctatatcagcattgtgaaagaaaagctcttcgagggagaaaagggcgtatttatcggcagcggaaagactgtattcggcgaaaacggtttcggctcgctgatggcggtgccgatgatcgaaaatgacaccgtcttcgggttcgcgattttattgaaaaaggatttgtatgcttttacttttgaaatgtataagctttttcaagcgctcattcaccatgcgacattggcggtcacgaactccatgctgcgcgacaggcttgagcatcttgttcagacagaccagctgacggagctgtattcaagaacctatctggatgagaaaattcaatacagcatgaaaattcataaacggggtgtattcatcctcgttgatatcgataatttcaaaaatattaatgatacatacggtcatcaaacgggagattcgatcctgattcaggtggcctccgttatgaagaaccatattcgtgagcatgatgtcgctgcgaggtgggggggcgaggagctggctgtctatctgccgaatatcaacgtgtcatccggagaacgcatcgctaaaaggctggttcgcgccatccgggaaaacaccgagccgcgcgtgacgatttcctgcggcgtttcctgctggtcaaagaccggcccgatgccgttgaaattgctcgttcagcaagcggatgaggcgctttatatcgccaaacggaacggcaaaaaccggctgatcatccatcaaaacagtacgacgacataaaaaaggagccggcctgccggccgggctcctttttttatcctaatcgtttttcaagcgtttcaacaaactttgctaaataggtttcgtccgtttcatcaaaacggtttttcacggggctgtcaatgtccagcacaccgatcacttcaccgtttacacggatcgggaggacgatttctgactgggaagccgcgtcacaggcgatatgtcccgggaacgcattcacatcggcaatccgctgcacgtcgccattagagtaggcagtgccgcatacgcctctgccgaacggaatgcgcacacaggcaggaagtccttgaaacggtccgagcacgagctcgccctctttagcgaagtaaaaccccgcccagttgacttcatgtaatgaatggtataaaagcgctgacgcattcgcgtaatttgcgatcgcatccgtttcatcttctgtcatggcttcgagctgtttaagcagaagctgataacttttttctttatctccggattgtttttcgacatgaaacatggaaaaccctcactttttctataatatcaaacaaagttccggccgttctgccggcatttgtcgagaagttcttacaggaacggcgcctttctgcttgaattgttacacataaaggggtgagccgtatgaaagtaagcaccaaagacaaaattattaacgccgctgtccagctgtttaaccaaaaaggttattccggcacgtccgtccgtgaaatcgcaaagtcagctgatgtaaatgttgcgcacatctcctactattttaaagggaaaggcggattaatggaacatttagtttccgagttttacgaaggctatactgaagcgctggaaaaagccgccgtcagtatgaacggtgaagacgcgcaggaacgcatcctgcgggtgattttcgatattttatcctatcagcacgataaccgtcaattaacgcggtttgtgtaccgggaagtgacgattgattccgtgctgatcagggaaattatgtctacttacttaatgaaagaaaaatatattttccagctggtgattgaagaagggcagtcacgccacagacggctgacgctgcccgtgccgcattttattctgcagttgaagtccctcttgatgatgccgtatcttcagccccaatacattacggaggtgctctatatgcagcctcatgaaccgtacttttataaaaggtattttgaagagatgaagatctggatcaaaagcgtgttccgacggcctgatgcggcgcttatgaagtaatgatgcttttgtacgtttcgtaggaactgccgacatcttccgcttgatgggcgtccgacccgaatatgagcgggatttttttttgcttcgccgtctcagccatccaatcctccatgtatacttccccggcaaacttctttctgagcccggatgtattcacatccagctccattccgtgttctttcacggcgtcaagacagcgggccgcaagctctcttatttgaggtgacatgctgtaagggaaaaggcgcgcgaattttttgacgagcgtgatatggccgacccgttttggcttaaaggggccgagcggtgttacaatggaagaatacacagtttcatagtattgttcatatacggcttcaacgcttccgaattgcgcgacaagctgctgaaaggcgtgctcgtcaaaatccaggcatatataagacggaccggtcttcaaaaaatgaacggataaaatgccgtcatccagtgaggggccgtacgtgttcagaaacgccgcggtttcctcttcataccctgtgataaaatcggtttccagcccggtcagaatgctgatttgtccatcgtattcctttttcaggtgtgacagccgctccaaataaacctccatctgtctgagatccatcgcgctgtcctgaagcggtacgggatcttgaaatgacggaggaaggggggcgtgctctgtaaatgtgatcgagtcaaagcctctttccagggccttttcgacatattgtttcagcgcatccttcgagccgtgagggcaaaaaggcgtgtggatatgagcgtctcgtttttccatttgtgtcactccattaaaaaattgcagaatcctgccgaaattatgcaaaaagtttttgatttctggtcaaaaaatgttggttacatggtatcataataacaatgaaaacgacagattttctcaatacatatattgaaatctttctgaatacataaaacaccctgacagattaagagaacaacaagggggctcattatggagttagtcatcggattattggttatactgctcgcgctctttgcggcgggctactttttcaggaaaaaaatttatacggaaattgaccggctggagtcatggaagattgaaattttaaaccgttcgatagtggaagaaatgtccaagatcaaacatctgaaaatgaccggagagacggaagagttctttgaaagatggcgcgaagagtgggatgaaattgtcacagcccatctgccgaaagtagaagagctcctttatgatgccgaagagaacgccgacaaataccggtttaaaaaagcgaatcaggtgcttgtccacattgacgaccttctcactgcagccgaatcaaatatagaaggcatactgcgtgagatcagcgaccttgtgacgagcgaggaaaaaagccgcggagagattgaacaggtgcgtgagcggtattcaaaagcgcgaaaaaaccttctggcgtacagccatctctacggagagctttataacagcctggagacggatctcgacgaaatctggagcggcataaaagagttcgaagaagagacggaaagcggcaattacatcaaagcgagaaaagtgctgcttgaacaggaccgcagactggatcagcttcagacatacatagatgacgttccgaaactgcttgcggactgtaaacagaccgtgccgaaccaaattgccaagctgaaagacggctaccgggaaatgacggaaaaaggctacaaattagagcatattcaaatcgaaaaagagctggatacactcacaaatcaattgaaacgggccgaaaacgcgcttttggaagaattggatgtcgacgaagcgtccgccattcttcagctgattgatgaaaccattcaatcgatgtatgaccagctggaaggcgaagtggaagccggacagtccgtattaagcaaaatgcctgagctgatcatcgcgtatgagaagcttgaggaagaaaaagaccgaacaaaaaccgaaacggagctcgtcaaggaaagctatcagctgacggcgggtgaaatcggcagacagcatgccttcgaaaaacaactggaaacgatcggccggctccttgagcaggcgagagaaaagcttgatggtgagcatgtcgcttactctctattgattgaagaagtcgaggccatcgaaaagcagatggaagaggctcagaaagaacatgccgaataccgtgaaaatctgcaggcgctcagaaaagaagaactgcaggcgcgggaaacgctgatgcatcttcggaaaaccatttctgacacggcccgaatgctgcaaaaaagcaacgtgccgggtattcctgaacaagtcaaggacaagctcgaaacggcaaatcatcatatagaagaaaccgtcagccaattggaagtgctgccgctgaatatggaggaagccgccaaacatctgaccgaagccgaaaaggcggttgaggaagtcagcgaagaggcggaagatcttgtgattcaggtgaagctgattgagcggatcatccagtacggcaaccgcttccgaagccagaatcatattttatccgaacagctgaaagaagcggaacggctgttttacgctttcagctataatgaagcttatgagatggcggcagatgctgttgaaaaagcagctcccggcgccgtgaaaaaaattaaagctgatcaatctgcttcatagacgcataagcaaaaactgcaccctgatggaaatcagaggtgcagttttttagtttctcacggaatataaaaagcgcctgcggctgataaacgtcaagccgcaagcgctgaatgttacgattttgctttatttaattcgatgggcgggctggtaaaaaacgtgatgatgcagccgatgatcgctccggcaatgcccggaagcacccagccgattcccatgctgtaaagcggaagatttgcgtttaagaatgaatctaatgatccgagcggaatgcctgctgccttcaaaccgtccaagatactgaacagccccgttccgatcaggcaggcgatatagacttcccgtctttccttaaagattttatcaataaaggaaaggacgataatgacaatcgccagcgggtaaatcgctgataaaataggaactgaaaatgcaataatctcagcaagtccgaaatttgaaatcgccagactgaacagcgtgacaatcgtaaccaccattttgtatgataaagcaggaatcaattttgaaaaatattcgccgcaagatgtgacaagcccgatgcttgtcgttaaacacgcaacggtgatggcagagccgagaacgatgtttcccagtgaaccgaacaggtaatctgatgaagctgataaaatctttgcgccttcgccgatcggacctacagcgtccgtgcttgtcgctcccaaataggccaaagataaataaatgaatgtcaaacctgccgctgcaatcagacccgctttaatacaagcggccgcgagcgctttacgctgggtgacgcccctgcttttaacagcgttgacgacaacgacgccgaagacgattgaggcgagcgcgtccattgttttatagccttccaaaaatcctttgaacaccggcgttccggaatatgcctgatgtacggcgcccagtccgcccatcggagtgacaatggcttttacgacgatgattagaataataccgaatttaataggagtcaaaatctttccgactctgtcaacgattttggaaggattaagagctaaataatacgtaatagcaaaaaagatcaacgtgaaaacaaataaagataatctttccggaatgccgcttaaaaacggaactgcaccgatttcatatgaaacggttccggttctcggaatcgcgaaaagcggcccgattgataaataaagcacaacggtgaaaatagtcccgaataccggatgagctttatcggcaagccctttcgcgtctttgcccgttaatgcgatggcgataatacccaaaagcggcagacctacgccggtcagtaagaaaccgcccatcgctttccagacattatgccccgccgcttgcccgagctccggcggatatatcatatttcctgccccgaaaaaaagtgcgaaaagcatgaaaccgataataacggtatctttgacaggtagtgagtgtttcataaaaatcctcctaaatactatgttgaaatattctgtcaattaattgtcagataatataacaaaacgaacattacttattatatggcaatgtacagagaagtcaatactcgatttattgcgaatttatatttacttttgttatggtagcataaatatcatacgatgtaccgttttcattaaaggagtaaaaaaaatgatatatttagacaacagctcaacgaccgagccgtatgaagaggttttggaagtgtataaacagacgagcagccgttatttcggcaacccttcgtctctgcaccagttaggaactgagacggaacagctccttgaagcggccgctcagcaaataaaaaaaaccttgcgtttaaaaaattatgatattgtatttacatcaggcgcgactgaagcgaataacgcggcgttaaagggagcagcctgggcaaacatgagtaaaggaagacatatcattgcttcggcgattgagcatccttctgtgacggagacgcttgatcagctgacagagctgttcggctttgaagtcacatatcttccggccgatcaaaacggcttcgtttctttgaaagacgtcaaatcggctatcaggccggatacgataatcgtcagcgtcatgcatgtcaataacgaagtcggctccattcagcccgtaaaggaaatcggcgggtttttgaagcagcaccggaatattctgtttcatgttgatcatgtgcagggtattcataaagttcctctgtctatagaagaagcgggcattgacctttgcaccgtttcagggcataagtttcacggcttaaaagggaccggagcgcttatcgtcaaaaaaggaacgcggctcattccgcttataacgggcggctcgcagcaaaaaggcgtccgcgccggaacagaacacacggcaggcgccgtttcccttgcgaaagcgatcaatctttccgcgcgtgacatgaacgagcggctttcttccatggaggctgccaagaatgcgctcatggaaaggctgagcgggacggacggggtcgtcatcaacactcccgccgaaaacagcgcgccgcatatcattaatttttccgttccgggcgtgaaggcggaagtgctgctgcacatgcttgaggaaaaaggaatatatgtctccacaaccgcggcatgttcggcaagagagcacaaaccgagccgtgttcttctgcaaatgaataaaggcgaacagattgcatcaagcagcatcagagtcagcctgaacttcagccatacggctgacatcacggagccgtttatggccgcgctggcgccggctgttcaaaaactaaaaaaaatgatgaggtagcatatgaattacgatcatattttaatccgttttggtgaaatatccacaaaaggaaaaaacagacgcagttttattgaaagattaaaacagaatatccgcctggtattaaaggattataaaaaagtaaaatacttttcaaaccgggaccggatgtcaattacacttaatggagaaaacccggaggaaatttgttccttattaaagaatatattcggcattcaaagctttagtctcgcaattaaatgcgaaagcaagctggaagacattaaaaaaacggctttagccgcgatagaaggcgaatataaaccggggaatacgtttaaggtcgagaccaaacgggcttacaagcagtttgaattagatacgaatgcgatgaacgctgaaatcggcggccatattttgaaaaacacggatggattaaccgtcgatgtgaaacatcccgatattccgcttcggattgaaatcagggaggaagcgacattcctgactattcgtaacgaaaaaggcgccggaggccttcctgtcggttccgcgggtaaagcgatgctgatgctttccggcggttttgacagtccggtcgccggtttttacgcgatgaaacggggattatctgttgaagccgtacatttcttcagtccgccgtatacgagtgaacgggcaaagcagaaagtcatggatctcgcgggatgcctcgcaaagttcggcggcagtatgacactccatatcgtgccgtttacaaagacgcaggaactcatccaaaaacaaatcccggaaaactatacgatgacggcgacgcggcgtcttatgctgcaaatcgcggacagaatcagagaagaacgaaaagcgctcgcgatcattacgggagaaagcctcgggcaggtagcgagccagacgcttgaaagcatgtatgcgatcaatgccgtgacggcaacgccggttttgcgccctttaatcggaatggacaaaacagaaatcatcgagaaatcaaaagaaatcggcacttatgaaacaagcattcagccgtttgaggactgctgcaccatctttacgccgccaagtccgaaaacacgcccgaaaaaagaaaaaatcgagcacttcgaaagcttcgttgattttgaaccgctgattgcagaggccgctgccggcatcgaaaccatcactgtttactcagagcaggaagctcacgataagtttgccggcctgttttaaaactgtatacaattaccaaagtttttttgaatgaagacatgtgttttatcacattctatactcacaaggaggtgatacacatgtcacaacaatcaaacagcggaaacagcaaccagcttttagtgccaggcgctgctcaagctatcgaccaaatgaagtatgaaatcgcttctgaattcggtgtaaaccttggaccggaaacaacttctcgcgctaacggttctgtcggtggagaaatcacaaaacgtcttgtctcttttgctcagcaaagcatgggcggaagcagccagcagcagttttaatcacaacttcacataatggctaagagagcggggaattccccgctcttttttcatgagtatagatagaaggcgggaagcaatttatgcatatttttattgtaatggcctatgtttatgtataatggggaaagaaagtgaggagttgttcgtgttaaaacgagaagatttaatcgccccaaagaactataaccttgtaaatgaaatcgaaaagttcagccgttctaaagagaagaacgcgcttatatgggaagatcaaacaggcggcaagaaagtctggacgtatgaaaaattgatggaagaaacgaataaaatcggagcccgcctgaaaggtctcggatttgaaaaaggcgataagctgattgtcatggttccgagagtgcttgaagcgtatgccgtttatttagcgatcttaaaagcggggatggtcgtcattccttgctcggaaatgctgcgcgccaaagaccttgaatatcggatcaaacacgccgaagtgaaaggcgctatcgtttatccttcatttataaacgcgtttgacgaggtgaataccgagcagctggtgacattgtcaatcggtgaaaataatgtcggctggaaaaacctcctaacgattgaagcggacggggacagttttcaaacagctgatacaacaagagaagacatggcgtttttgtcctatacttcaggcacgaccggccagcctaaaggcgttgtacatacacacggctgggcctttgcccatttaaaaacatcagccggtgcatggctggatatttctgaagacgatacagtgtgggccaccgcggcgcccggctggcagaaatgggtgtggagcccgctgctcgcaattctgggaagcggcgcgacaggagtcatttatcacggcagattcaacgccaagacgtatttagagctgctggagcgccatcaagtaaatgtcttctgctgtactccgacagaataccgcctgatggcaaaagtggaggagttggacaaatatgatctttctgcccttcacagcgcagtttctgcgggtgagccattaaaccgggaagtcattgacgtattccggaagcatttcggcattaaagtgagagacggatacggccaaacggagagcaccctgttagtcggcgtcctgaaggacatggatattaagccgggaagcatgggcaaaccgacccctggaaatcaagtggagattataaacgataaaggcgaaatatgcgaaactggcgaaacgggcgatatcgccgtgcatttgagcacaccggctttattcaaggaatattataaagatcctgaaagaacgaaaaagcagattcgcggagattactttcttacaggagaccgcgcgaaaaaagacgaggacggctacttttggtttgagagccgcaatgatgacatcatcgtcagctccggatatacaatcgggccttttgaagtagaggacgcgctcgtgaagcatccggaagtgaaagaatgtgccgtcgtggcgagcccggatgaaatcagaggttcaatcgtaaaagcttatgtcgttttacaagacgatgaaaagcgcagtgacgaacttgtcaaagaactgcaaaaccacgtaaaaacgattacggcgccttacaaatatccgagagaaattgagtttgtcgaaagcctgccgaaaacggcgtccgcaaaaatcagacgtgtggagctgagacagcgtgaagaacggctgaaggctgataaaaaagcataatacaggataaagggtgagcggggatgaaagcgatttggcacggcggcaccatctatacaatgctggacaagaatcatgtcactgaagccgtttataccgaagaaggcgtcgtcaggcagacgggcagcttccgggagctccaaggaacatacggttcgcctgatacggaggaaatcgatttacatggagctgtcatgttcccggggtttacggacagtcatatgcatttaatcggacacggggaaaaacagcttcgcctcgatttgtcgcagctgacgttaaaagaagcgatactgcgggccgcaaaagaagcagagcgtgaattggaagatggcgaatggctgatcggcgaaggctgggatgaaaatctgtttgaacggccggtttacgtcacgaagcatgaccttgacccgctctttcccgaccgccccgtcctgctgaagcgggtatgccggcacgccgcggcggttaattcggccgcattgcgcgcggcgggaattacaaacgaaacacctgatccaaacggcgggattatcgtccgggatggcaccggtccgacaggccttctgctggataaagcccaagagcttgtgacacaggccctgccgcccgtctcacttcactatgtcaaacgcgcgcttcaaacggcgattacggactgctggtcaaaaggcctgaccggcgggcattcagaagatctggcatactacggcgacgcgtccgttcccgttgccgcgtacgagtcattaaccggcagcggcctttatccttttcgcgcccatctgctcgttcatcacgaagccgtcgacagctggagcgctctggataaatcgaccggaccttatctggaatacggagcgatgaaaatttttgctgacggcgcgctcggcggcagaaccgctctattgaaaaagccttatcacgatgatccgtcagtttccggcgttcaggtgcatgatgacgaaacccttgccgctcttgtttataaagcgagagagaaagggatggagatcgccgtgcacgcgattggcgaccttgcatttgaaaaggtgctggatgttatcgaaagatacccggcaaagcccggacagctagacaggctcattcatgcgcaagtattagatgacggattgattgaaagagccgcccggctgccgatcggacttgatcttcagccgcattttgtggccagtgattttccgtgggtgattgacaggctcggagaagagcggatgaaaacggctttcgcctggaaaacactgctgtcaaaagggctgttgtgcgccggaggttcagatgccccgatagaaccggccgatccgcttctgggcattcaatcggctgtgctccgtacgagcaagcagcacccggaaggtccggcctattatgaaaaagagtgcctgaccgtgtacgaagccattcagctttacacggagggaagcgcggccatcatccataaagaacatagccgcggacggatcgcccccggctatgatgccgactttaccgtactcagcggtgatccgttcaggacggacccgaaaaagcttcatgaattggaagctgtcaaaactgtcgtcggcggccgtatcgtatatgaaaaagaggacaggcagtgatgcccgtcctctttttttatgataaaaatgatcgttttactttttcccagaaagagttgtctttcagtttcaccgttttgatttttttatcggatagtctaatctcaacctttttgacattccgcgtgctgagcgcttcattatcaagcccgataatcggatgctcattgccgtcttgcaccacctgcagtgtcagcttccggtctgagcttaaaataaacgaagatccgagtgtacggtatgtgttgttgttcaacgacgccagttcggatacctgcatgcaggaaatcaaaggatcaacaacggcgcctgaaacagatttattgtaggcggtgctgcccgtcggggtggaaatgatcatcccgtctcctctgaatgtctcaaaatgaagatcatcaattaacacatccatcacaaacgttttaataatgcttgaacggatggaaacctcgtttaaacagtgaaaatgattgctgccgtccaccgtgacgtgaatgagcgggtattttctgacctcaagctgttccgcggtcatgctggccgccattttttcaggctcatcgctgtgaaaatcacagtacaaatgggctttcccttttttagcgatgccgacatacaggcagtcatcacggaatccggtttttctgacggcttgcagaaatgagccgtcgctgccgatgctggcgataattccggcatcctccggttgagccgcaactgtaaaaccgtgcgattcagcaagctgcttcaaagagctgacttgttcttttgtttcgttgttttgtttgtggaaaaaataaacattgcggcgaagatcggtcatatccccattcccctttgctgtcatatttacgtttttctcccagcaggtattgtgttaaaatacctgtggcaatagtgtaacatgtttcctgtttatccgttaagggaaagcgcttcatgaaaaaaatgaatctttttttacgggggaacgtacgaatattgacagaaaaggaggagaacaaatgaatgcaaaaagatggattgcgctcgtcatcgcgctcggcattttcggcgtatcagtcattgcaagtgtgaccgtcggggtgctgaagaatatcggagatacagggtctgactttgcatcactgacagatgacacagaagaagtgacactggataagggcagccccggcagtaaaatcgccgtgcttgaagtggacggcacgattgaggataacggcgggtccgctggcctgctcagctcaggcgggtatgatcacagatcatttttaaaacaggttgagcgtgcgaaagaagataaaagcgtcaaaggaattgtactgaaaatcaattcccctggcggaggcgtgtacgaaagcgcggaaatacataaaaaactggaagaactaaagaaagaaacgaagaaaccgatttatgtatccatgggctccatggcggcttcgggaggctactatatttcaacggccgccgataaaatctatgcttcaccggaaacgctcacgggttcactgggcgtcatcatggaaagcgtcaattattccaagctcgccgatgaactcggcatcaagtttgaaaccattaaaagcggcgcgcataaagacatcatgtccccgacccgcgacatgacgaaggaagaaagaaagatcatgcagacaatggtcaacgattcttatgaaggatttgtcaatgtcatttcaaaaggccggcacatgtcaaaagcggatgtgaaaaaaattgccgacggccgtgtctacgacggcagacaagcgaaaaaaatcggcctcgttgatgagctcggtttttacgatgatacgatcagtgcgatgaaaaaggaccataaaaatatgaaaaacgcttcagtcatcacatacgaggaaggattcggattaggctcgctcttttccatgagcgcagcgaaaatgtttaaaagcgaaattgattttctgaatatgaaagaactcatttcgcaatccggttcgccgcggatgatgtatctctatgcaaagtaggggggaagaaagaatggacgcgacttacgaaggctttcacggcaaagaagaggaagctgaacaacagagggcgcccgagcaggcatatgcgggcttttggatcaggttttgggcgtttcttcttgattggctggtggtctgggggctaaaccatctcatcgtttcaccgattttcacgctgatgaagctcccggcaacaagcggaatgtttacaatctcagcttattccgtcacaaccctgatcgtctacctcgcctattttgtgttcatgacgaaatggtttcatcagacactcggcaagatggtcttcgggttaaaggtcacttctttgacgcccggaaagccgctgacttggagcaccgtcattttcagagaagcggtggggcgttatatcgataaaatctggattctctatatcgtcattgcgtttacgcccaaaaagcagggcattcatgatctgatcgccgacacaacggtgattcacgaagcgctgtaccgcaaataaaagcagtaaacccggaataaacgtccgggtttattttttttggttttggcgataatgctgctaaggaagtgaagcttatgggatatgccgcagcagctgttattctcattctcattttggcctggctgctcatgaggatgaaaattcatctgacgctcgaatatcttcatgataaagataacgacaaactgacgtttaaactctcggccttatacgggctgatccgtattaaaaaaacgctgcccgtcattaaggtaaacagcgaagacgcgtcaattgatgtcaaacaggacacaaaatcagaaatgaaaggtcagaaaaaagagaagaaaaaaatcacatatgaagatgtcaaacagagcattcacagaatagaaatgattctgcaccaagtctttcagatgcgtcaaatcggcgcctcatttcttgcgggagtccgtgttacgaagttcgaatgggtgacggttatcggaataaaggacgccgccgttacgggaatcgccgccggcgggttgtgggccgtaaagggaggccttacggcgatgctgtatgatcatctgcgtttcatacataaaccggtgtgcgaagtcattccgtcttttcaagtgcctgcatccaagacgcatttgcagtgtatattcttttttcgttttggacatcttataggtgcagctttcaaattgctcaaatacgggcggaacggactttctatcatacgaaagaaacagccggttccggttgcttcaaagaatgattcatcagtttaaggaggagcgcatatggcagaccatcccattcaaggtttaatgaaaaccgctatggaaaatttaaaagaaatgattgacgtgaatacaatcatcggcgatcctgttgaaacgcctgacggcagcgtaatcttaacggtttcaaaggtcggattcggatttgcggcgggcggaagcgagtttggaggaaagccggctgaaaaaagaaccgatgatgatgaaagaaaagagcagaagctcccgttcggcggcggaagcggcggcggagtatccattacgccgattgcgtttctgattgtcggaacaaacggggtgcgtatgcttcatttagacgaaaacacccatctgattgataaactgttagactccgcgcctcaaacgattgaacgcatccagcatatgtttaaaaagaatgaaaaaggccggaaccaaaaaagaacggatatcgatttataacagaaaagttaactgccgcccgcagttagctttttttacgatgcggcataacctttgcagtttgcataaaactcgactatgatagagctatacatagataaagggaggaatcagaatggctgaaattacatttaaaggcggagccgtgacgctgatcggacaagaagtgaaaccgggtgaccaagctcctgacttcacggttttgacaaacggattagaagagaagacattagcagatatgaaagggaaagtaacgatcatatccgttattccttccattgacacaggcgtatgtgacgcgcagacacgccgcttcaacgaagaagccgcaaaactcggtgatgtgaacgtttatactatcagcgccgaccttccgtttgcacaagcgcgctggtgcggagcgaacggaattgataaagttgaaacattatcggatcataaagagatgtcatttggtgaagcattcggtgttcacatcaaagaacttcgtcttttggcgcgttccgtattcgtccttgatcaggacggaaaagtcgtttacgcggaatacgtaagcgaagcgacaaaccacccgaattatgaaaagcctatcgaagctgcaaaagcgttaatcaagtaaagagagaaaaagagctccgggtgctgccgcggagctcttttcatggcaaggaggaaacagcatgcaacatgaccatgtcggtcagatttatgaacttttagatgaagccgcccaagtgatagcagaaggccttcagatttcttatattgaggggcttgcggaagcgggagagatgtattttcttgaaaaggccgaccagcttccgcttcaggaaaagaaaaccggcgagcttaacagcctgctcgcgaaagcagacttcagaaaatgggagcatgaatggatccgcaaggcgttccagctcgccattttaaaagggctcaaagataagtcccatccgaacagacagatgacgcctgatacgatcggccttttcatcagttacctcgtgaataaatttacgggcggccgaaaaggcctgacattgctggaccccgcctgcggcaccggaaatcttctgctgaccgcggcaaaccagctttctgacaaagcgggaaaaagcttcggcattgaaatcgacgatgtccttctgaagatcgcttatgctcaggcgaatctgcaggaaaaagaaatggagctgttctgccaggacagtcttcagccgttatttatcgaaccggccgatgcggtcatctgcgatttgccggtcggctactatccgaatgacgaaggcgctgaagcgtttgagctgaaagcggatgaaggccactcatttgcccaccacttatttattgagcagagcgtcaaacatacaaaaccgggcggatacttattttttatgattccgaaccatctgtttgacagcgcgcaaagcgataaactgaagcggttttttgcggaaaaagtgtatatcaacgcccttcttcagctgccggctactatgtttaaagacgaagcgcaggcaaagagcattttaatcttgcagaaaaaaggcgaagacgcaaagccgccgaaacaagcgcttttggcgaatcttccttcttttgcgtaccagcaggcgatgcgggagatgatggcaaaattggatcaatggattcaaacagaaaaatagtggcgaaaaagcagtgcgagatgcaaaatcccgcgctgcttttgctttttaaaatgaatggaaatcaggaggataacacaaattaaggaaagaaaataacattccgtaaggccgtgccgtccatttggcacaaataaaatttatcagaaaatatcgacttcatattgtaagcggtgccaatatggatgttgacttgaaatgctgagttgacaatgtttaaatggaaaagtcagatattttttggactgcagttatggtctgggaaaaaagaacgaacaaacgaagaagaattttgataggagcgtcatttatgtctaaaattattgcaattaacgcaggaagctcatctttaaaatttcagttattcgaaatgccttcagaaaaggtgctaacaaaaggtttagtagaacggatcggtatcgccgacagcgttttcacaatctctgttaacggcgaaaaaaatacagaagtgacagatattccggatcatgcggttgcggtgaagatgctgcttcacaagctgactgaattcggtattataaaggatttaaatgaaattgacggaatcggccaccgtgtggttcacggcggagaaaaattcagcgattctgttttgcttacggatgaaacaatccgtgagattgaagagatttcagaacttgcgccgcttcataacccggctaacatcgtcggcattaaagcctttaaagaagtgcttccgaatgtgcctgcggttgcagtgtttgatacggcgttccaccaaacgatgcctgagcaatcttacctgtacagcctaccgtacgaatactacgagaaatacggcatccgcaaatacggtttccacggcacttctcataaatacgtgacacagcgcgcagctgagcttctcggccgcccgcttgaagatttgcgtctgatttcctgccacctcggtaacggcgcaagtatcgcggccgtagaaggcggaaaatccattgatacgtcaatgggcttcacaccgcttgcgggtgttgcgatgggaacacgttcaggaaacatcgaccctgcattgattccgtacattatggaaaaaacggatcagacggcagatgaagtattaaatacgttaaataaaaagagcggactgcttggcgtatccggtttctccagcgacctccgcgatatcgtggaagcttcaaaagaaggaaacgaaagagcggaaacggctcttgaagtgttcgcaagcagaatccataaatacatcggttcttacgctgcgagaatgagcggcgttgacgcgattattttcactgcgggtatcggtgaaaacagcgttgaagtcagagaacgcgtgcttcgcggcttagaattcatgggtgtatattgggatcctgcgctgaacaacgtgcgcggcgaggaagcgtttatcagctaccctcactctcctgtcaaagtcatgatcattccgactgacgaagaggtcatgatcgcacgcgacgttgtccgccttgcacagtaatgatcgaaaaaagcacatcctttagggtgtgcttttttattgaatgccccagaatcaaacgttacgatatgtttaatacataaacgatgaggtgaagcaatgagtgtgcatgaacataaacaagaagccccgtcagccgtgcgctgcaaggtgattacagtcagcgacacgagaacgaaagaaaccgacaaaagcgggcgcgtcatgatggacttcctcagggaagcgggatttgaaacggtcgcttatgacattgttaaagatgaaaaagatgaattgcagaaagccgttttatccggctgtatggatgaatatacagatgcggtgctgttaaacggagggacgggcattgccgaaagggatgtcacaattgaagcggtcacgccgctgttttcaaaagaactcccgggattcggcgagctgttccgcatgctgagctatacggaggacatcggttccgccgccattttgtccagagcggcagcgggtgtgatccaaaataccgcagtcttctgcacgcccggctccacaggcgccgtaaagcttgcgatgagtaaactgattatacctgaactgcctcatgtgctccgggaaattcgaaaagatttataaatgtataaaaaggctctgctccgctcaaaaaattgggtggggttttttttataaaaggcttgaaaaaacagaatttacttgttacagtgtatacatacaaaatgcatttttattaattaaaactaatttttatacaaaagggagcttttaacatggcagaacaaaaaaaggttgtattggcatactcaggaggtcttgatacttctgtagcgataaaatggctgcaagaacagggatacgatgttgttgcctgctgcttagacgtaggggaaggaaaggatttggcattcgttcagcaaaaagcgctggaagtaggtgccgtaaattcctatgtgattgatgcgaaagaagaattcgcccgggagtacgcgctcatttctatgcaggcccatacaatgtatgaaggcaagtatccgctcgtatctgcattatcccgtccattaatcgcgaaaaaactcgttgaagtcgcggaaaaggaaaaagcggtggccgtagcgcatggctgcacgggaaaagggaacgatcaggttcgttttgaagtatccattaaatcattaaatcctgatctggaggtcattgctccggtccgtgagtggcaatggtcgcgtgaagaagaaattgaatatgctgcaagccgcggcattccgattccgatcaatcttgacagcccgtattccatcgaccagaacctatggggacgcgccaacgaatgcggtatattagaagacccgtgggcggcgccgcctgaaggggcatatgacctgacagcatctcttgaaaacacgccggacgttccggaaatcatcgaaatcgcatttgaagccggtgttccggtttcaatcgacggcgtaacctacccgctcgctgatttaattctcaagctgaacgagactgccggaaaacacggcatcggccggattgaccatgtggagaaccgcctggtcggcattaagtcccgtgaagtttacgagtgcccgggcgcgatgactttgattacggctcacaaagagcttgaggatctgactttagtgaaagaagtggcccatttcaaaccggcaattgaacaaaaactgtctgaaatcatctataacggtttatggttctcgccgttaaaagacgcgctgcttgcattcctgaaagaaactcaaaaacacgtcaccggcgtcgtgcgcgtcaagctgtttaaaggccatgccattgtagaaggacgtaagtcggaatattcactctatgatgaaaaacttgcgacatatacaaaagacgatgcttttgaccatcacgcggcaatcggtttcattgagctttgggggctgccgacaaaagtaaacagcattgtgaaaaagaaggagcagattgaagcatgaagaagctttggggaggccgttttcaaaaaacaccggaaaagtgggtcgatgagttcggcgcatccatcacattcgaccaaaacttagtcaaagaggatattacagggtctctcgctcatgcggcaatgctgaaaaaatgcggcattctgacggaagaagaagaaggcgccatccgacaggggctgcagaccctcctgcaaaaagcagaggaaggaacacttgaattctctgttgattatgaagatatccatttgaatattgaaaaaatgctgatcgaagaaatcggaccgctgggcggcaagcttcataccggcagaagccggaatgaccaggtggcgaccgacatgcatttgtatttgaaagatcatgtctcacatatcatcgtgctgattgaacagttccaaaaagcgctgatcgaaaaagcggaggccaatgtcgagaccattctgccggggtacacccatttacagcgggctcagccgatttctttcgcccaccatctgcttgcttatttttggatgcttgaacgggataaagagcgttttcgcgatgctatgaagcggattaacatatcgccgctcggatgcggggcgcttgccggaaccacgtttccgatagaccgtaactattcggcggagctgctcggttttgactccatttatgagaatagtcttgacggagtcagtgacagagattttattctcgagtttttaagcggcagcagcatgctgatgatgcacctttcgcgtttatcagaagaaatcattctatggtgctcgcaggaattcagattcattgaactggatgatacgtatgcgacgggaagcagcatgatgccgcagaagaaaaaccccgacatggcggagctgatccgcggtaaaaccggacgcgtatacggtgatatgatggggcttttcacgattatgaaagggctcccgctcgcttacaacaaagacctgcaggaagataaagaaggcatgtttgatacggtgaaaaccgttgaaggaagccttcagattttcacgggcatgattgaaacgatgaaagtaaacaaagacatcatgaaacaagcgacaaaacaagatttttcaaacgcgacggaacttgccgattatttagctaaaaaaggcatgccgttcagagaagcgcatgaagtggtcggcaagcttgtgtacagctgcattgaaaaaggaatctatttaagtgatatggcatttgaagaattccttcaagccagcagtctctttgaagaagacatctataccgtgctcgatccgcatcatgcggttgaaaaaagaatgagcgccggcggaacgggttttcagcaggtagaacaggcgctcgtaaaagcaaaagcctgcgccggcatttaatttgctgaaattcccttcatattttcccgtcatatcagacaccctacatctataaagatgggaggtagaaggaatgcgcaaagaacaagaccgttacatctatgatgaaaaagaaagtgaagaaacggccaggctcatttcagaggcatacgaaagcggttatgtcggcatggaggaagcctctgctccttcagaaaattaagctgtctgtaaagacggcttttttttcgtgcggacgaagtgcaaaaaagtgatattgccgtttgtttatagtaaagtagagggagaaacgtcttgattttattgaagcggctacgttgcctggggagggtattcaatgtgcgacatgctctaatcactgccggtacaaagggattgggccgaaaagtgactgaaatgcttctggaaaaaggcttttctgtcacagtgaattacagacaagacgaagaagcggtcgcctgtctgaaggcggattatcccgggtgccatgacagattgcaattcgttaagggcgatgtaacccggaaagaagatctcatgcggatcgccgatgcagcccttcagcggtttggaaggattgacatactgattaacaatgccgggccgtacatatttgagcgcaaaaagcttgccgattattccgatgacgaatggtatgacatgcttgaagggaatttaagcgccgttttccatctgtttaaagcggttatcccggtcatgagacagcagcggttcggccggattattacatacggttttcaaggagcggaccatgcccccggctggcttcaccgttccgctttcggagcggctaaagtcggattggcttcgttaacgaaaaccattgcgattgaagaagctgaatcaggcattacggccaatatggtctgtccgggtgatattgtaggagatatgaaagaagcgtctatagaggaagcaagacggaaaatcggcaaagaaaagacgccgatcggcaggtccggaaccggagaggatattgcgagaatcatcgcctttttatgtgaagaagattccgatcttgtaaccggaacggtcattgaagcaacaggcgggctgaatgtgattaacaggcatcaatccctgtaagttttttcgtttgtcaaaaagggaacttgataaatattaattttttatgaggtgaaaacaatgaaagtgacttatcacggacattctgtcattcaagtggaaacgaaaacccataacattatttttgatccgtttctgaccggaaacagtctgacaaatttgaaaccggaagaagtgaaagcggatgtcatcctgcttactcacggacacaatgaccatgtcggagatacagagcagatcgccaaacaaaacgatgcgctcgtcattgcgccgaatgagctggccgtttatctcggctttaaaggtttaaaggtccacccgatgcatatcggcggggcgcgccaatttgatttcggcaaagtgaaactgacacaggcattccacggatcggcggtcactgatgaagaaaacaaaactattacgtacacggggatgccggccgggattttattgacgattgacggcaagacgattttccacgccggggacacggcgttgttctcagatatgaaactgatcggggaactgaaccacattgacctggcgtttctgccgatcggtgataacttcaccatgggccctgaagatgcgaaactcgcggctgagtggctgagagcgaaacaggtcgttcccgttcattacaatacatttcccgtcattgaacaggaccctgacgctttcgccgaaagtctgcccggaggcgtcggcaaagtcatggcggccggcgagaccattgagcttgcctgacatatgtgtcaaagaccttctgaatcaagcattcagaaggtctttttgtgatgccgccttttttcgggcgtctcattgcgaatgaatcccccgtacccttataataaaagcagaagactgtccttagaggtgaaacgcttggcaacaaagcatgaacaaatcctatcatacatagattcgcttcctgtcggtgaaaaaatttcggtcagaagaattgcgaaagaaatgaaagtcagtgaaggaacggcttacagagccattaaggaagccgaaaacaaaggattcgtttccactattgaacgtgtggggaccatccggattgaacagaagaaaaaagaaaatattgaaaagctgacatacgccgaggtcgtcaatgtgatagacggccaggtgctcggcggaaaagccggtctgcataaaacgttgaataagtttgtgatcggcgcgatggagcttgacgcgatgatgcgttatacggcggcggggaacctgttaatcgtcgggaaccgaatcaacgcccaccgccaggcgcttgaagcgggcgcggctgttttggtaacaggagggtttaataccgacgacagcattatcgagctggccgatatgcttgagcttccgattctctccacgagctacgatacctttacggtagccgcgatgatcaaccgggcgatctatgatcagctcataaaaaaagagattgtgctcgtggaagacattttgacgcccgcagatcggacagtgacgctgtcccctaaggataagctggagaaatggtacgaaaaaaactatgaaaccggacacggccgcttcccggttatcgatcagcagatgaaaatccacggaatcctcacatcgaaagatatcgcggggcatgaccggtcagttccgattgaaaaagtaatgaccaaaaaccctgtcacggtgatcgggaaaacatctgtcgcctcagcggctcaaatgatggtttgggaaggaattgaagtgcttccggtgacagacgggcatcacaaaatgatcggaatgatcagccgccaggatgtcttaaaagcgcttcaaatggttcaaaagcagcctcaggtcggggaaaagctggatgatattgtttcaaggggatttaaagaagaggaagatgacaaaacgccggccgtttatcaatatgaagtcacgccgcaaatgaccaatcagctcggcacgatttcttacggggtgtttacgacgattttaacccaggccgccagccgatttttacgctcccgcaaacgcggcgagctggtcattgaaagcattacgattttcttcctgaagcccgtacagatggagtcggtcattgaagtgaaaccgcgcattttagaggcgggccggaaattcgggaaaatggaagtggaagtgtcaagccaaagcggcatcgtttcaaaagcgatgctcatggtgcagctgatggagagaagttaagggacgcacccgggtcccttggcattcattatgcgtggtctctctccgcttcctttgcatggatgggctcatagtgcttataggctttatacccggcccatgcgctgcctgctccgattaaaatgaagacgccgccgatgaccagggtcaggacagagtgaaacagaatcatttggtttactccgtacaaaagcaccagcgcgcctaatgccatacttgatttagccgaaaaacattccttctccagcgcccgtttcgtctggattccttttactttgtaatacacgtaaaagcaggcagaaagcccgatgagaaaaacaaaaaccagcataaatgaaatcctccattatatgagtttgcaaaaccgtttataccgttgctgaaagattttccttttccatggataaagagtatgattaaatgaataaaaacaaaaaggagaaaacgatgaaatccgaactgatcagaaccatatcattatatgacaccattatcttacatagacatgtgaggcctgacccggatgcctacggttcacagtgcggccttacggaaatcctgcgggaaacgtatcccgaaaaaaatatttttgccgtcggacagcctgagccgtccttgtcttttttatattccctcgatgaggtggatgacgaaacctataaagatgctcttgtcatcgtgtgcgacaccgcaaaccaaggcagggtcgacgatcagcgctaccattccggcgcaaagctcatgaaaatagaccaccatccaaatgaagatccgtatggcgatctgttatgggtcgatacgaatgcaagctccgtaagcgaaatgatctatgaactgtacctggaaggaaagcagcacggctggaaactgaatacgaaagcagctgagctgatctacgcgggtatcgtcggtgatacggggcgtttcttattcccgaacaccacaaaaaagacattaaaatacgcgggagagctcattgagttcccattttcatcgtcagagctgttcaatcaattgtatgaaacaaaattaaatgtggtgaagcttaacggctttatttatcaaaatgtgtcactgtctgaaaacggcgtcgcttccgttttcattaaaaaagacattttggagacatatggaaccaccgcttctgaagcgtcgcagcttgtcggaacactcggaaatatttcgggtatccgcgcttgggtgtttttcgtagaagaagacgatcaaatcagagtccggttccgttcaaaaggtccggtcatcaacggaattgcccggaaatacaatggcggcggacatccgcttgcggccggcgcatccatcttcagctgggatgaaaccgatcagattcttgctgatctggaagaggtatgtaacgaacacaagtagaggggagaccctctttcttagtgttcatctgtcacggggatgaaccagcagccgaaatcagtcaggtcttcgtagacgcggagattacagatttggagttctttttttatgagggaagcgagtgtgtctgtttctgcatatgcggaatagccttgtctgattcgggctgcatgatcttttgccaagcggcgttcactaaaaacctccattttcccttcctcccttcagaatcttgaaaatgtctcatctacagtttataaaaaagcggagaaaaaagcgacaggtctatggaaattttttaaaaatgacataattacgtcgcaaaagaaatatgaatttcgacagacaatctcgtataaatcgtcagttcctttacttcagccttaaattccttctcatttatggtgtatatcttgttttcgatcgtccgttttaaaagttcctttgttttatacacactttcaatatcctttgtgatgacttcagaaatattatctttcacttgttcctcaaatttcatcttgtcaggctgagcgattctgtatttttccccattgatcagcttcacatcaacactttggatgagaagtctttgcttattatcctcatttaatttatgaagatccttctgatagatcgagatttggttttttaaatcccgcgcgtgctcacgctgcttttcaattaacgtcacctgttcttcctgaaacgttccgtatgtaaacagaaagaacagccagctgacgatggctccgcacatcattcccgcaaaaaaacgctgccatcccggttttttataatactcgggaattctcatgatgacatattctcctgggtcagccatgaaataatcagccagccggtctgcgcgccgcccattgctgaaataattaaaagaagctgtttgaagatgtcgcgcgtgttgccttcaaacagcccccgctcgaaactgtataccgcgtcaaatgttcccccgatggccgcgacaagcgcccagatcttcagcctgttcgccaattttgtgatcgctgtcagcggaggctcacctgataaataagctccgagtccgccgatcagcgcgccgccgagcaacacaccgagggcgataaaataactgctgatgaaattcgccataaatccggcttcctgatccatatatacaccacctcacttttctatcatattgagcgaaacggacaagtatgatgatgagtcaaaaaaagaacatttgtttcttaagaaaacccgtcttataatgtagaaaggcaaaatgaacgtatgggaaaggagtggcggcattgtcttttgttcacctgcaagtacatagcggctacagcctgttaaacagcgccgcttctgtaaaagagcttgttactcaagcgaaggaactcggatattcatcattggcgctgacggacgaaaatgtgatgtacggcgccattgagttttataaagcatgcaaatcaaacggaattaagccgattatcggtctgacggcttctatatacacggacgatacggagcttgaagcacacccgctcattcttttagcagagacaaacaccggctatcagaacctggtgaaaatctcaagtgcgctgcaatccatggcaaagggcggcatgaagcgaaaatggatgaagagctatcgtgaggggctgatcgccattacgcccggtgaaaacggctacattgaaagcctgcttcaaaccgggaagtttgaagaagcggtccgggctgccgaaggattccgggagctgttcggagacggccgtttttatttaggataccagccgtttaaaggacatgagacgttatcagaagagattctccgtctgtcagccgaaacggaaatcgctgtctgcgctgcgggggatgtccgttatatcaagaaagaagatcaagatgcgtaccgctgtctgtgcgctattaaagccggagagaagtgggaggatcagagcggggatctgccggacttatacttgaggacgcctgaagaaatggcagagctttacacgcggcatccggaagcgattgaagcagccgcgcgtatcgcccggcaatgccgggtcgatgtcagcctcggacagacacagcttccgtcttttccggcaccggacggcaaatcagccgatgactatttggcggagatctgtcatgaggggctgcgcctccgtttcggcactcctgatgagcgcgctgtccgccggcttgaatatgagctggacatcatcaggcgcatgaaattcagtgattattttctcatcgtatgggactttatgaagtacgcgcatgaaaagggcattgtgacaggcccgggaagggggtccgcggcaggctcgcttgtcgcttactcccttttcattaccgacgtggatccgcttaaacattctctgctgtttgagaggtttcttaatcccgagcggatcagcatgccggatattgatatcgatttccctgatacgagaagggatgaggtcattcagtatgtacaaaataagtacggggccatgcacgtcgcccagattatcaccttcgggacattggccgcaaaggcggcgttaagggataccgggagagtgttcggaatcagcccgaaagaagccgaccagcttgcccgcctgattccgtcaaaaccgggaatgacgcttgaggaggcgaggcggcagtccgctcagctgaacaggcggctgtccgaatccgccgttcttcataaagtgtttcagatcgcaaggaaaattgaaggtcttccgcggcacacgtcaacacacgcggccggggtcgttctcagtaaagagccgctttcggaagttgtccctcttcaagaagggcatgacggcgtgtatttaacgcagtatgcgatggatcacttggaagatctcggtcttttaaaaatggactttttaggtttgcgcaacttgacgcttattgaatccattaaaacgatgattgaaaaagagacgaatacgaaaattgatttttccgagatttcttatcaggatgaaaaaacgttctcactattgtcaaacggtgatacgacgggtattttccagctggaatcatcaggaatgagaaacgtattgaagcgcctgaagccgtcaagactggaagacattgtcgcggttaacgcgctttacaggccgggaccgatggaaaatattccgttatttatcgaccggaaacacgggcgggcgcgtgtggaagtgccgcacgaggatgtaagaaatattctcagtgacacttacggcgtcatcgtctatcaagaacagataatgatgatcgcctcgcgcatggcagggttttcattaggtgaagcggatctgctcagacgggctgtcagcaaaaagcaaaaggacattctggacagagagcgaagccattttgttgaagggtgcataaaaaaggagtattctgtagtcactgcaaacgaggtctacgatctgattgtaaaattcgctaactacggattcaacagaagccatgctgtcgcatacagcatgatcggctatcagctcgcctatttaaaagcgcattatccgttatattttatgtgcgggctgttgacgagcgtcatcggcaatgaggacaaaatatcgcaatatctgcatgaagcgaaggggagcgggattcaagtccttccgccgtcaataaacaaaagcggttttccgtttgcgccggaaaacggagccgtcagatacagtttgcgggccgttaaaaacgtaggcgtctcggcagtgaaagatatttataaagcaagaacacataaaccgttcgaggatcttttcgatttctgctttcgcgtacccgcaaaaagcgtgaatcggaaaaccatcgaagcccttatattttctggcgccatggacgaattcaatcaaaatcgcgccgccttgctggcctccgttgatgtggctttagagcacgctgaactttttcgtgcagacgatgaccaaatgggattgtttttggaagaatcgttctccattaagccaaaatatgtagaggctgaggaatttccgctcgtggacaagcttcggttcgaaaaagaagctctcggtgtttatttctcaagccatcctttatctgctttcagggatctcctgaaaaaaaggggggcgcaagcgatcacagcagcgcggcagatgccgaagggacagctgtcaatcggcgctttgctcgcgggcatcaaaacgattcggacaaagacaggtcagcatatggcgtttctcacattaagcgatgaaacgggagaaatggaagccgtcgtgtttcctgaccaatatagaaggctgtctccgctgttaaaagaaggcgcgcttttattcgccgccggaaaaatggaagagcgtcaggagaagacacaattcatcatgtcatccgcctctcttcttgagcagacggaggcagacagagcgccgtctgtttacatcaaaatcgaaggcagccggcacaatcaggagtttttggaaaagatgaagcgtattttactggagcataaaggggaaaccggcgtttatctttattatgaaaaagacaagcagacgatcaggctgccggatacttttcatattcaggcggaccatcaggcgttataccgcttaaaagagctgctgggccgcgaaaacgtcgtgttaaaatagtggtaacaataatcattttgttatacaattgaaacaattgtgctatcttatttaaagattctgaaatttttcacctccagcgattgtaccagtctatgcggcagaatatgtaacaaagtacttaaaaggagtgtttagaatgtcattaagagaagaagcgttacatttacacaaagtaaaccaaggaaagctggaatcaaaagcaaaggtagaagtcagaaacgcggacgacttaagccttgcctattctcccggagtagctgagccttgtaaagagatttatgacgataaaaacaaagtatatgattatacaatgaaggggaacatggtagcagtcgtaacagacggatcagccgttctcggtctcggtaatatcgggcctgaagcttcacttccggtcatggaagggaaagcggtgctgttcaaaagtttcgcgggcgtggatgcattcccgatcgcgcttgacacaaacgatgtggacaaaatcattgacactgtgaagctgcttgcaccgacattcggcggtgtcaaccttgaagatattgcggcgccgaactgcttcattatcgaagagcgcctgaaaaaagaaacaaacattccggttttccacgatgatcagcacggcactgccatcgtaaccgttgccggacttgtaaatgcgctgaaattatcaggaaaatccatgtcatccattaaagttgtggcaaacggagcgggagcggcaggcatcgcgatcatcaagcttctttaccatttcggcgtacgcgacatcgtgatgtgcgactctaaaggggcgatttacgaagggcgtccggccggcatgaacgcagtgaaaaacgaagtggccaagtttacaaaccaagaccgcaacgacggttcgctgcaggatgtcattaaagatgcagacgtctttatcggcgtatcagtcgaaggcgcgctgacgaaagaaatggtggaaagcatggcgaaagatccgattatcttcgcaatggccaacccgaatccggaaatcatgcctgaagacgcgcgcgcagccggcgcaagcgtaatcggaacaggccgttctgatttcccgaaccaggttaacaacgtgctggcattccctggaattttccgcggggcgcttgacgttcgcgcgactcacatcaacgaagaaatgaaaattgctgcggttgaagcgattgcttccctcgtttcagaggaagaattaagcgctgattatgtcatcccggctccatttgacaaacgtgtggctcctgccgttgcgaaagctgttgcgaaagcagcgatggaaacgggcgtcgccagaattacggtcgatcctgaggaagtggctgaaaaaacaagacagctcacggttatcggcgaataataacacaaaaatgaaatggcagcgcgttggaaaaaaacaacgcgctgctgttcaatatacggactgctggcatttttttaagggcaggtcttaaaaaaaattcagcagaatccttatttcttttgaaaacgctgacagataaggctgaacaacgctttttacggtatgaaatccgtccgtttccgtctgttttgcagcaaaaaatgtcgaatggaggatgacaccgtttgacaaaaaaagtacaatagtttcggtaaagttattattaagtctatctaatcggaagacatgcagtgaagagaacccttcacaaaagggaggtaatcatttgttaaaggatatattcacaaaaaagaaaaaatatgcttccgtgccgtctgagcaggcaaaacatgatgttccggaaggcattatgacaaagtgctccaaatgtaaaaaaatcatgctcacaaaagagttagataaaaacctgcgcgtctgcatgaactgcgggcaccatttccccatgaatgcaaagcagcgcattgaaagcctcctggatgaagattcattcgaagaattcaaccagggaatgatatctgaaaacccgctcggtttcccggaatacttagaaaaaatcgaaaaagaccgtgagaaaacatcgctgaatgaagcggtggttaccggaaaaggaaccatcagcggattccctgccgtgatcgcgatcatggattcaacattccgaatgggcagcatgggttcggttgtcggcgaaaaaatcacgcttgcaattgaaaaagcaaaagaggaaaaagtcccatttatcatctttaccgcttccggcggcgcacgtatgcaggagggggtcttaagccttatgcaaatggccaagacaagctctgcattaaaactgttcagtgaggagcagggactgattatttctgtcatgacccatccgacgacaggcggcgtatcggccagtttcgcgtctctcggtgattataatttcgctgaaccgggcgccttgatcggatttgccggaagacgtattattgaacagacgattggggaaaaactgccggaagatttccagacggcggaatttttattaaagcacggccagcttgatgcggtgattcaccgaaacgacatgaaagacaaactcgcatttctgctggacatgcaccaaacaggaggtgagcatgagtggctgcaagattagaatttgaaaaaccagtgattgaactgcagacgaaaatcgccgaactgaaaaaattcacccaagattcggagatggatttaagcgctgaaatcgcaaggcttgaagaccggctcagcaagctccaggatgagatttataaaaacctgaagccgtgggacagagtgcagatcgcacgccttcccgaccggccgacgacgcttgattacattcaatacctgtttaccgacttttttgagtgccacggagacagaacatacggagacgatgcggcgattgtcggcggagtcgccaaatatcacggcatgccggtcaccgtcatcggtcatcagcgcggaaaagacacgaaagaaaaccttgtccgcaatttcgggatgcctcaccctgagggctaccgcaaagcgcttcgtctcatgaagcaggcggataagttcaaccgcccgattatctgcttcatcgacacgaagggagcgtacccgggtaaagcagcggaggaacggggacaaagtgaagccatcgccaagaacctgttcgagatggccggcctgactgtgcctgtcgtttgtatcgtcatcggggaaggcggcagcggaggcgcgcttgcattaggtgtgggcaaccgcatgctgatgcttgagaactcgacgtattccgttatttctcctgaaggagccgcgtccattttgtggaaagactccagccttgcgaaaaaagcggccgaatccatgaagattactgcgcccgatttattagaattaggaattattgatgatatgattaaagaagtgaagggcggagctcaccatgatatcaagcagcaggcgggctatattgacggtattcttaaagaaacgttaaaatctcttcttcaattgaacgccgaagaattgatctcacagcgctatgaaaaatataaagcaatcgggaaagtttcggttgaggatcaatatatcggggtaaactgaatagacgtgaagcctatggctcacgtttattttttgtgatttttgtgatattccttaaattttatttaaaaacaatttatttaattgtataataggtaaggtttcatgggagctcaggcgtcccttttcattgttttagggcaatgatcatgatatgtttaacatatatatgttgctgaggtgaataggaaatgaagcgtataggagttttaacgagcggcggggattccccgggtatgaacgctgcggtgcgcgcggttgtgcggaaagctatctaccacgacgtcgaagtgtacggaatttataacggttattcaggattaatcagcggaaaaatagagaaactggagcttggttcggtcggtgacatcatccaccgcggcggaacaaagctgtatacggccagatgtcctgaattcaaaacagttgaaggccgtgaaaaaggaatcgaaaatttaaagaaactcggcattgaaggtcttgtcgtcatcggcggagacggttcatacatgggtgcgaaaaaattaacggaacacgggtttccgtgtgtaggtgtaccgggtacgatagataatgacatcccgggaactgattttacgatcggatttgatacggcgctaaacaccgtaattgatgcgattgataaaatccgtgacaccgctacgtctcatgagcgtacatacgttattgaagtgatggggcgccatgcgggcgacattgctttatgggcaggtcttgcaggcggagcggaatcaattttaattcctgaagcggactacgatatgcaggaaattatcggccgtttgaagagagggcacgaccgcggcaaaaaacacagtatcatcatcgttgcagaaggggtaggcagcggagttgaattcggaaaacgcatcgaagaagaaacgaaccttgaaacacgggtatccgttttagggcacatccagcgcggcggatctccaagcgcttctgaccgggttcttgcaagccgcctcggcgcttacgcggttgagcttctgcttaaaggaaaaggcggacgctgcgtaggtatacaaaacaacaagcttgtagaccatgatattatagaaattttagaatcaaaacatactgttgaaccaaacatgtatcagctttcaaaagaactgtctatttaaggcggaagaagctgaagatttcagaaggaagtgaacgagttgaaaaaaacaaaaatcgtttgtacaatcggtccggccagtgaaagtgtagaaatgctgacaaaattgatggaagcgggtatgaacgttgctcgtctgaatttttcacacggtgatttcgaagagcacggcgcaagaatcaaaaacatcagagaagcaagcaaaaagctcggcaaaaacgtggggattctcctcgatacgaaaggtccggaaatccgtacgcacgatatggaaaacggcgcgcttgagcttcaggcgggaaatgaaattatcgtttctacgaaacaggtgctgggaacgcttgaaaaattctcagtttcttatgaaggcctggcagacgacgtgtcagcagggtctatcatcctgttggatgacggtttaatcggattggaagtgctggaatcaaatccggaaaaacacgaaatcaaaacaaaaatcttaaacagcggcacgctgaaaaataaaaaaggcgtaaacgttcccggcgtcagcgtcaaccttcccggaattactgaaaaagacgccaaagacatcgtattcggtatcgagcaaggcgttgattttatcgctgcgtcatttgtacgccgttctacggatgtcctggaaatccgcgaactgcttgaagagcataacgcgtctgacattcaaatcattcctaagatcgagaaccaggaaggcgtggacaacctggatgcgatcctggaagtatctgacggcttaatggtagcgcgcggagacctcggcgtagagattccggccgaagaagtgccgctcgtgcaaaaagaaatgatcaaaaaatgcaacgcgctcggcaaaccggttattactgcgacacaaatgcttgacagcatgcagcgcaaccctcgcccgacacgcgctgaagcaagtgacgttgccaacgccattttcgacggcacagacgctatcatgctttccggtgagacggctgcgggacaatatcctgttgaagcggttcaaacaatgtttaacatcgccacacgcacggaagaatctctgaactacaaagaaattctgtctaaacgcagagatcaggtcggcatgacgattaccgatgcgatcggccaatcagttgcgcacacggcgatcaatctgagtgcggcagctatcgttacccctacagaaagcgggcatacggcgcgtatgatcgccaaataccgtccgcaggctccgattgtagcggttacggtcaatgagtctgtatcacgcaaactcggccttgtattcggtgtattcccggcaagcggccaaaacgcgacttcaaccgatgaaatgcttgaagacgcggttcaaaaatcacttgacagcggcatcgtgaaacgcggtgatctgattgtcattacagcaggttctgtcggtgaatcaggcacgacgaatctgatgaaagtccacactgtcggcagcattatcgcaaaaggacaaggcatcggacgcaaatctgcattcgggccggtcgttgttgcaaaaaatgcgaaagaagctgaacaaaaaatgacagacggcgcagtattggttgcttcaagcactgaccgcgacatgatcgcttcacttgaaaaagcatcagcgctcatcactgaagaaggcggtttgacaagccatgcagccgttgtcggtttaagcttgggcattccggttatcgtcggtctggagaacgcaacttcagttttaacagaaggacaggttatcacagttgacgctgcccgcggcgctgtgtatgaaggccgcgcaagcgttctttaaacagctttaaaaaagagaggggggggttttcccttctcttttgtctttaggctgattttcctattcccatgcgggcggtgacgcgcttttagaagggcaggagggcagaaaaatgagagtgttattcttactgtttatcgtgtgtccggcaattgaaatcggcttgtttctgctggcgggaaaatggctcggtatttttccgaccttccttctcatcattttgacaggcgtgttaggggccttggtggcaaaaagacagggaaccgatgtgtatcatcgggtgatgcgcgacctgcagcacggcaaaatgccgggggaagcgcttcttgatggaatatgcgtctttttcggaggcctgcttttgatgcttccgggttttctgtccgatattgcaggggcctgtcttctgattccgttcactcggaaccgcatgaagccgcttttgttcaaatggctgagaggaatgtcaaaaaacaagcggatcattatcaaataaaaacggcagccttcttacagggctgctgtttttatttagattgaacagtaatataggcccatatttcttttaaagcgcccgttgtgataaaggcctgaatgaaaacaagcagcgcgggccccgcagccagtcctaaaattccgaacagtttaaagccggcaaacagggcgattaaggtcgcaagcggatcaagtccgattgacctgcttaaaattttcggctccgtcagctggcgctgaatgagaaccacaatatataaaacaccgagaccgatcgcttgaggaagctgaccggcaatggccaaatacataatccagggaacaaagaccgacccggcgccgagatacgggagaaggtccaccaagccgataaaaaaggcgatggttgccgcatgctcaatccctaaaagaaaaagtccgataaagacaatgatcatcgtgaaaagtatgagcacggcctgcgccttaatgaaacctgccatcgcttttttcagctctcccgatacggccttggcgtttgccgaaacccgttccggaagaatggaataaagcagcgctttcagcttatgccagtcctttgtcataaaaaaagtcgccagcattgcgaaaatgaagacggcagctgtattgggaaggaaggcaatccatttcggcaccagctccaaaagatgtgaaagcatcagccccgcatttttagcggctgtatcaccgagggtctgaatatgcgtcacgatggatgcctgctgattggtttccagtccgttaaataagacggtcagctcgtggtacaatggctgaatgcgggaagtgaacagctcttcacaatacgtcataaaggcgctgatatgaggagggagcgttttggccagataggcggttcccgaaatgatttccgcaacgagaaatgtcgccgcgccaagaagaataagcaaaaagaagaccaggacaatgactgtattgactgaccggggcatccccgtcagtttgtccagccagtcaactacgggaatgatcgctgatgacagaataagggcgatcagaaacggataagttaacggaaatgaggcgtaaccggccgccaaagcgccgccggccgcagcgagtacaaacagcgcgcggaaaaaaacagttgcatagtgcgggttcacatcgatcctcctctcggtcggcacgtcctattacattagtttattcgtcaaaaaaaaggatatgaatacagatatgatgaaagaaggtgctttcaggatgtttacacaagcgaatttatttttactattattgctggccatcgcattggtagccaaaaatcagtcattgctttttgccgtcggctttctcattgtgataaaagctgtcggtcttgatcagaaactatttccggttattcagtcaaaaggcatcaactggggggtcaccgtcattacaatcgccgttttagtgccgattgccacaggtgatatcggttttaaacagctcggagaagcgatgaaatcatattatgcgtggatcgctctcggtgccgggatcgcggttgccttaatcgccaaaaacggtctcaccttattggaaaacgaccctcatattacaacggcgctggtcatcggcacgatacttgccgtcgcgcttttcggaggcgtcgccgtcggcccgttaatcggcgccggaatcgcctacttggccatgcaaatcgttaaaatattcacttcgtaaagtaaaaaagcggcgtaaagctgcttttttttgtggagaaaattagagtttgcacttgcgcattttgtagttcagacaaatgccatttgcattattccgatgaatgaagtggcttaccatgtaacaaagaacttcgggattgacggcgcacatggagcgaaaacagcgattgcattaattccaattgatgaatggattaaaagctgatggaatttatgcgctgataccaaagcaaaacttgaagtgttgtcaaaataagcggagaccctttccttcaatttgaaagtttgttaaatttataatgagaatgaaaaaacacaattcggttggtagtccggatgcatgatttaaaatgtcagtaaccttcccctcctcgggatgtccatcattcttcagtaaatttaggaggagggaatcgttatgaaattaacggtttactatgatggtcagttttgggtaggagtcattgaagttgtgaatgatgggaaattaagagcaattcgtcatttgtttggacaagagccaaaggattcagaaataatgcattttgttaataatcaacttttacagactctctcccgcactgaacaagaaggggtttgtgttaaagcaaaatctaagaaattaaacccaaaaagattgcaacggcaagcttctaaagagatgaaaaatatcgggatatcaactaaggcacaaaaagcgataaaacaggagcttgaagcaagaaaagaaaagaaaaaacaactgaatagaaaacaaagagaaaaaataaaggaacaaaaatatttaatcagaaaacaaaaagcaaaagaaaagcataggggcaaatagttggagaacccgatgaagcccttcgatttaaagttgagcggcatcagtttgtttcttcggactgttttagaaaaaagaagtagaaatcgagcccttctcgagatgaggagggtttttctgcaatttatttaaattcacttacatcagtaaatgagtcagtttcaattgatgaacggtttgatgatgatatttacggcccgaaaacagcgcaaatgcagtcaaacgattccagtccatgtacggccttactgctgacggcattcatgggtcaaagacaaagatgaaaatcagcgttaaagaaataggaaaaattagataaagaacgaaaaaatttctaaatatagttggattgatatattattgaactctgcatatgtgataacaatagcagctttaaataggtgtaacaggaggtagattactaaagaatctaaggttagtatttgggttttaatatttgattagggggaaataatgctatcacttaatagagctttaaaattacgtgatttagaagtttttcgtgtgctgaaagatggtaacattttatcttacgtaataattgaagatactcgaaagccatttacagaagaagacaaaaaattagaaccattgtgttatatggacgaagaagatattaatgcgattttaaatgtttttaagatttcaattgttaatgatgaaaaattaaatgaagataattcaatttttataagatcttacttttctgaatttgttaatcatacaaatttaacgaattttattattaaagaatatgttcaaaaggatttatataattacgatgatgaagatgacatcattttctttaatagaattttacgtagtataggatcagattatgttatcaaagaatttgacgatataaattggatttatttatctcaagattgatttcttatttagattttgaaggagtacagaagataatttctgtacttctttttaaggcgaaaaatagacttctagtttctctttatagcataaattcacttgacgaaaatcgtaagtttagcacccgcaaaagcaatttgtttctctgtctctgctttcgctattacgttcggtgtaattgcttttgtaggaaacacgactcatcttcatcataatgcagccaaaactgataatgaggtaatacaactagctgcacgactgcaaacatgacttaaaagatgtggcctttttagggctgcatctttttttgtcatgtattttcgttttttctctttttaggcggggctgcggctgctgcatttataagcatggtaacaggttatgtgaagtccgcagaaaaatacaaatggatcgttatatacacaaaagcgaaatacgaagtaacaacaaagatatatagaaaatttgagccaactaaaaccaagacagggatttctgaagctgatccgaacattgattcagtcgagtaaacaaaataaccctcttctccggtaaagaaggagggggaatttgcggtgaagttgtcgcgcctgtccttttaaagtcacctccaaaactcccccaattgaaaacatgagaatacatggttttacaaagcgcctgaaagcaagcgattaaatttatcaacgcaaaaccttgatatatagggcttttaaaacatttttagttaaaagtctacaaattaatcagattattgtttataataagaataggcttaaacttaaataagcttataagaatttgttatattcctctataagcatatcggttatgtaaccgcaatcagtgaaatgtaagcattttcttaaaggggaaagggattgtttgcatgactcattttaagtaagccgtatgttttatatactctttaaaggggaattttgattgaaaaggagaggttgaatatgacagcaacacgcggtcttgaaggggttgtagcaacaacatcatctgtaagctctattatcgacgatacccttacatatgtagggtacgatattgacgacttgacagagaatgcaagttttgaagaaatcatttatttgctgtggcatctgcgcctgccgaataaaacggaacttgctgaactgaaaaaacagcttgcgaaagaagctgccgttccacaagaaatcattgagcacttcaaatcttatcccctcaataacgtacatccaatggctgcgctccggacggcgatttcattactcggtctgactgacagtgaagccgatgtcatgaatccggaagcgaactacagaaaagccatccgtctgcaggcgaaagtgccgggcattgtcgccgctttctcaagaatccgcaaaggacttgatcctgttgaaccgaaggaagagtacggaatcgcggagaacttcctttacaccttaaacggtgaagagccttctccgatcgaagtggaagcgtttaacaaagcgctcattcttcatgcggatcatgagctgaacgcatcaacatttacggcgagagtatgtgtcgccaccttatctgatatttactcaggcatcactgccgccatcggcgctttaaaaggaccgcttcacggcggagccaatgaagccgtcatgaaaatgctgacagaaatcggcgaagtggaaaacgccgagccttatatccgcagcaaaatggagaaaaaggaaaaagtaatgggcttcggacaccgtgtgtataagcatggagacccgcgcgccaaacacttaaaagaaatgagcaaacgcctgacgaatctgacgggtgaaagcaaatggtacgagatgtcaatccgtgtcgaagaaatcgtgacgtcggagaaaaaactcccgcctaacgttgatttctattccgcatctgtataccacagtctcggcattgatcacgatctgttcacgccgatctttgcggtcagcagaatgtcaggatggatcgcccatattcttgaacagtacgataacaaccgcctcatccgcccgcgcgctgactacacgggtccggataagcagacttttgttccgattgatgaaagagcctgatcaaacgggaggctggtgattttcatgtcgttagcctcttgttaatcaagcccggattggtttacaattttgatagaatcttgagaaaagtcattttattttctatacaagaaaaataaaatgttttctaaatatgaattacatactgggaggtaatattgtgtcacaaggtgaaaaaattacagtctctaatggagtattaaacgtaccaaataatccgattatcccgtttattgaaggcgacggcacaggccctgatatttggaacgccgcttctaaagtattggaagccgctgttgaaaaagcatataaaggcgagaaaaaaatcacgtggaaagaagtttatgccggtgaaaaggcttataataaaacaggtgagtggcttcctgccgaaacgctggaagacatcagagagtacttcatcgccatcaaaggtcctctgacgacaccggtcggcggcggtatccgttctctgaacgtggcgctgagacaggagcttgatttgtttacgtgcctgcgccctgtcagatatttcacgggagtgccttctccggttaaacgtcctgaagatacgaatatggtcattttccgcgagaatacggaagatatttacgccggaattgagtatgcgaaaggttctgaagaagttgaaaagctgatcagcttcctgcaaaatgaaatgggtgttaacaaaatccgtttccctgaaacgtcaggaatcggcatcaaacctgtttctgaagaaggcacaagccgcttagtcagagctgccattgagtatgcgatcgaaaacggccgtaagtctgtcacgcttgtccacaaaggaaacatcatgaagttcactgaaggggcatttaaaaactggggctacgagcttgccgaaagagaatacggagataaagtattcacttgggctgaatatgaccgcattgtcgaaaaagacggaaaagaagcggctgataaagcgcagagcgacgcggaagcggcaggaaaaatcatcgtcaaagacagcatcgctgatattttccttcagcagatcttaacccgtccgagcgaattcgacgtcgtggcgacaatgaacttaaacggagactatatctctgatgcgcttgccgctcaggtaggcggaatcggaatcgcgccgggagcgaacatcaactatgaaacagggcatgcgattttcgaagcgactcacggaacggctcctaagtatgccggccttgacaaagtcaacccgtcatccgtcatcctttcaggagtgcttcttcttgaacacctgaactggaatgaggctgctgacttgatcattaaatctatggaaaaaacgattgcttcaaaagtagtaacgtacgattttgctagattaatggacggtgcaactgaagtgaaatgttcagagtttggtgaagagctaatcaaaaacatggactgaacctaaagcagacttctaatgaagccaaaaaaggagaagagaatcatgggaaaaacacgcagtaaagtttctgttatcggagcaggatttacgggagcgacaacagcctttcttacagctcaaaaagagcttgcagacgttgtgctcgttgatattccgcaattagaaaacccgacaaaaggaaaagcgctagacatgctcgaagcaagtccggtccaaggatttgacgcgaaaatcacaggcacgtccaactacgaggacacagccggttctgatatcgtcgtcatcacagccggaattgcgagaaaaccgggcatgagccgtgatgatctcgtatctacaaacgaaaaaatcatgagaagcgtcacacgtgagatcgtgaaatattctcctgactgcattatcgttgtattgacaaaccctgttgatgcgatgacatatgcggtgtacaaagaatcaggcttcccgaaagaacgcgtcatcggacaatccggagtgcttgacactgcgcgattcagaacattcgtcgctgaagaattaaacctgtctgtaaaagatgtgaccggttttgttcttggcggacacggtgacgacatggttcctctcgtccgttattcctatgcgggcggcattccgcttgaaacgcttatcccgaaagaccgtcttgatgcgattgtagaacgaacaagaaaaggcggcggggaaatcgtcaaccttctcggcaacggaagcgcctactacgcgcctgctgcgtcactgactgaaatggtagaagccattttgaaagatcagcgccgcgtgcttccgaccatcgcttacttagaaggcgaatacggtcatgaaggcatttacttaggcgtaccgacgattatcggaggaaacggcctagagcaaatcatcgagcttgaactgacagactatgaaaaagcgcagctgagtaaatcagttgaatctgtcaaaaacgtgatgaaagtattgtcataagaaaaaagggaaggcttccgaatcagaagccttcctctttttacaattaatgaaagcgttttctttttccctgagcgatcctttctctgaaaatgatcaaaaaggcgaattgtctgaacgggcagtattggataaaatgaaatcataaagtgatatgcagcacataaaatagagaaaattggatgtcggggaaaatagacagcggagggcgcagcatgaacaaaaaaattttagttgtagatgatgaacaatctatcgttactcttttacagtataatctggaacggtccggctatgatgtcattaccgcatcagacggcgaagaggctctggagcaggcagagaacgaaaacccggatttaatcgtactggatgtcatgctgccgaaagtggacggaatcgacgtctgtaaacagctcagacagcagaaaatgatggttccgatcttgatgctgacagcaaaagatgaggagtttgataaggtgctgggactcgagctcggagcggatgattacatgacaaagccgttcagtccgcgggaagtcactgcgcgggtgaaagccattttaagaagggctgacatttcttcgctgtcatcacaaggcagagaagaggaaaaggacgggcagatcctcatcggcgagctgaaaattcttccggagcattacgaagcgtactttaagtcagaacagctggaattgacgcctaaagaatttgaactgcttctgtatttgggaaaacataagggaagagtgctgacgagagatcttctgctgagcgcggtctggaactatgattttgccggggatacccggattgttgacgttcatatcagtcatctgcgcgacaaaatcgaatcaaataccaaaaaaccgatctatattaaaacaatcagaggtttggggtataaactggaggagccaaaaatgaatgaataaagtccgtgtgcgtctgttcgctttactcgttgtatgtatcatattggttttcagtgttctcggcctttttttacagcagcttatttcttcatccgctgaagaaagaacggcggatcagctgaaaaaggaatcggtatacatagcgggtcttcttgacaccggccgaatcggcaataaaagcaatgaaacggtaatccgtgacgccggccgcaccctcggtataaacgtctccgtgctcaacgagaagggtgacgccgtatatcattccggcagtcatgctgatgattcagccgtaaaggagttcatttctcacaataaaagcgaggaagccgtacagtcgaaaaacaaagtcatccgcggcactgccgtaaaaaatgacgccgggaaaattgcggggtatgtactcgtttcctctgagatcaacggcggttcaagtgttaccggagaaatgtggggcatgctggcagcaagtctttgtaccgcttttatcattatcgttttcttttatacaaacatgacgtcccgttacaaaaaatcaatcgacgccgcgacaaaggtggcgacggagctgtccaaagggaattacgacgcccgctcctacagcggctacgcaaggcggtcggaccgtctcgggcgtgcgatgaacagcctggcggtcgatttaatggaaatgacgagaacgcaggatatgcagcgcgatcgtctgctaaccgttattgaaaatatcggatccggtttgattttaatagacgggagaggttttatcaatctcgtgaaccggtcatatacgaagcagtttcatacaaagcctgaacgtctgcttcggcgcctttaccatgatgcgtttgaacatgaggagatcattcggcttgtcgaagacatttttatgacggagacgaaaaaatgccagttgctcagacttcccatcaatattgagcggcgctactttgaagttgacggcgttccgatcatgggccccgacgatgaatggaagggcatcgtcctcgtctttcacgatatgacggaaattaaaaaattggagcagatgagaaaggacttcgtcgccaatgtctcccatgaactgaaaacaccgatcacctcgattaaaggatttacggaaacactgttagacggagcgatgaaagacgaaaaggcgctttcagactttctgtctatcattctgaaagaaagtgagcggctccaatctctcgtgcaggatttattggatttatccaagatggagcagcaaaactttacgatgcgcgtagagtcctttgatgctgcaaaaattctgcatgaaattgaagcgcttttgcggcataaggctgaggaaaaaggcatcagctttcagctcgatctcccggaagagccgatttttgtgacgggtgacgcgcacaggctaaagcaggtgtttttgaatctggcgaacaatgccctgacctacacgcctgaaaaagggacagtggggatttcggtacatgtgaaagaaaccgttgtcgatatcaaagtgtccgatacgggaatcggcattcagaaggaagagatcccgcggatatttgagagattctaccgcgtggataaagacagaagccgcaactcgggaggaaccgggctcggcctcgccatcgtgaagcacttaatagaagcccatgaaggtaaaatcgaggtcacaagcgagccgggacagggcactgtatttaccgtgacgctgaagcggcagccggaagcgtgatcagctttacaaaggattaacaatttcttcatgacctgttaaacctatcttgttaggatataacagaaccccttcatccaaggagccaattttgacggcgggaacgtgttttcttgttcccgtccttttttgcgttttcgcagggttcgctcattttcctttcaaattgaactttgttaaaataagaggagctgtgagattaaaaaatagaggaatgacgagcttttgctcttaggaggatattgaatgacggaacgaaaaaaattagtgcttgtcgacggaaacagtctggcataccgggcgttttttgcattgccgcttttaagcaatgaaaaaggcattcatacaaatgccgtatacgggtttgcgatgattttaatgaaaatgctggaagatgaaaagccgacccacatgctggtggcttttgatgcgggaaaaaccactttccgccacagcacgtttaaagaatataaaggcggaagacaaaaaacgccgccggagctttcagaacagatgccgttcatccgcgagctccttgatgcctataacatcagccgctacgagcttcctgaatatgaagcggacgatattatcggcacccttgccgtatctgctgaaaaagacggcttcgaagtaaaggtagtgtcgggggacaaggacttaacccagcttgcaaccgggaaaacgaccgttgccattacgagaaaaggcattaccgacgtggaagattacacgccggagcacgtgcaagaaaagtacggtctgacccctttgcaaatcattgatatgaagggattaatgggggattcatccgataatataccgggcgtccccggcgtcggagaaaaaaccgcgattaagctcttaaagcagttccattcggttgagaaactgcttgattccattgatgaagtcagcggaaaaaaattaaaagaaaagcttgaagaatataaggaacaagccctgatgagcaaagagctggcgacgattatgacaaatgcgccgattgaagtcaagcccgaagatttagattacaaagggtttgaccgtgaacaagttgttgccatttttaaagacctcggttttaatacgcttcttgagcggctcggtgaagaaagcggggaaacggcggaagaaaattttgaagacatcaatgtcgaaacggcagaagaaatcaccgaagatatgctcgtttcgccgtccgctttggtcgtcgaacaaatcggtgataactatcacgaagaaccgatcctcggcttttccatcgtgaatgaaacaggtctttattatattccgaaagaaatcgccattcagtctgaagcttttaaatcttgggctgaagatgaatcgatgaaaaaatgggtgttcgacagcaaacgttccgtcgtcgctttgcgctggcagggaattgagctgaagggaacggaatttgacgcgcttcttgctgcctacattataaacccgggcaattcgtacgacgatgtcgcgagcgtagcgaaagaatacgggctgaatatcgtttcaaaagatgaagcggtatacggaaaaggcgcaaagcgcgctattccggctgaaaaagagcttgctgatcatctcgcgcggaaagcgtctgccgttaacagccttcgtgacaaactgcttgacgctttggaagaaaataatcagcttgaattatatgaagatctcgaactcccgcttgcgcttattctcggagaaatggaatcaatgggcgtcaaagtggatgttgaaagactgaagcgaatgggcgaagagctcaaggcgaagctgaaagaatatgaagaaaaaatccatgacatcgccggtgaaccgtttaacatcaattcaccaaaacagctcggcgtcattctgtttgaaaaactcggcctgccgccagtaaagaaaacaaaaacaggctattccacttcagccgatgtgcttgagaagctcgccgacaaacatgatatcgtcgcgtacattctgcaatacagacaaatcggcaaactccaatcgacttatattgaagggctgctgaaggtcacgcgcaaggattctcataaggtgcatacacgattcaatcaggcgttgactcaaaccggacgcctcagctcaacggatccgaacctgcaaaatattccgatccggctggaggaagggcggaaaatccgtcaggctttcgtaccgtccgaaccggactggcttattttcgccgccgattattcacaaattgaattaagggtgcttgcgcatatttcaaaagatgaaaatctgatcgaggcgtttacgaatgacatggacattcacacaaaaaccgccatggacgtgtttcatgtcagtgaagatgaagtgacacaagcgatgcgccgccaggcaaaggccgtcaatttcggcattgtttacggcatcagtgattacggactatcacaaaacctcggcatcacccggaaagaagcgggcgcttttatagaccgctatttggagagcttcccgggcgtcaaggcatatatggaagaatcggtgcaggaagcgaagcaaaaaggatatgtcacgacacttatgcagcgccgccgctatattcctgagctgaccagccgcaacttcaacctgcggagctttgcggaacggacggccatgaatacgccgattcagggaagcgccgccgatattattaaaaaagccatgattgacatggcagctgagctgaaagaaaaaaacttgaaggcacgactgctgcttcaggtgcacgatgaattgatttttgaagcgcctaaggaagaaattgaaatattagagaagctggttcctgaagtgatggagcatgctttggcgttagacgtgccgctgaaggcggattatgcttcagggccgtcttggtacgatgcaaaataaacagagaaaaaggaagtgatgattgtgccggaattaccagaagttgaaacggtccggcgcactctgaccggtcttgtgaaggggaaaacgattgaatcggcggatatcagatggccgaatatcatcaaaaaacccgccgagccggaggaattcgcgcggcagattgcaggagaaaccatccgatccatcggaagaaggggaaagtttttgcttttccatctggatcattatgtcatggtgtcccacctgcggatggaggggaaatacggccttcatcaggccgatgagcctgacgataaacatgtgcacgtcgtgtttcacatgacggacggaacacagctccgctacagggatgtccggaaattcggcacgatgcatttgtttgcgccgggagaggaattgaatgcattaccgctttcacagctcgggcccgaacccgatgatgaagcatttaccgctgcttatttaaaagagcggcttgcaaaaacgaaccgcgcggtgaaaacagccctgctcgaccaaaaagcggtcgtcggcctcggcaatatttatgtcgatgaagctttattccgggcgcgtattcatcctgagacaaaagcgaacagtctgtcagacgggcagataaaaacgcttcatacagaaattaaagacacccttcaggaagcgattgacgcgggcgggagcaccgtccggtcttatatcaattctcaaggggagatcggaatgtttcagctcaaacattacgtatacggcaaaaaggatgaaccgtgcaaaacgtgcggcacgatgatttctaaaatcgtggtcggcggaagggggacgcatttttgcgcccgctgccaaaaaaaatcataaactgaagctgtacaagcaggcggcagcagaatgacttttttctaacacagttgatgacctttctccatatatatattgtgattcacccaataggcatatgtcacaattgccgatcaagagaaagggagaaacggatatggagattgcttctttgctgcttttggcttttgctgtcagcttggacagtttttcagtcgggtttacgtatggtttgagaaaaatgaaaatcccgttcaaagcgattgccgtgatcgcttgctgttcagcctctgtgatgtttatatccatgctgatcggccattttctgacaaagatttttcccgtatccgtcacggaaaaactgggcgggctgatcttaatcggaatcggggcatgggtcatctggcaattttttaaaccggctaaagagccggattacttattgcatgaaaaaacgctacttaatcttgaagtgaaatcgctcggcatcgtcattcacattttgaaaaaaccgaccagcgccgatattgatcaatccggaaccattaacggagtcgaggcgcttctgctcggtatcgccttatccattgacgcgtttggcgccgggctgggatcggccattctcggcttttctccggttatgatgagcgtgactgtcgggctgatgagctcgctgtttgtttcactcggcataaacgcggggcatttgctttcaagatggaattggatagataaaatgacatttttgccgggagtcctgctgattatcatcgggatttggaaaatgtaagaaggagtgggctttttgagcttggtcatcggtttaacgggaggcatcgcaagcggcaaaagcacggtagcgcgtatgctgatcgacaaaaaaataacagtcattgatgcggatgtcatcgcaaaacaggcggtggaaaaaggaatgccggcttacggacaaattgtggaagcattcggaaaagacatcctgctggaaaatggcgatattgacagaaaaaaactcggttctatcgttttcactgacgaacagaagcgtctgaagctgaatcagatcgttcatccggcggtacgtgcggaaatgctgaaacagcgggatgaagccgttgcgagaaaagagcagttcgtcgttttggatataccgcttttgtatgaaagcgggcttgattatcttgtcggcaaggtgctcgtcgtcaccgtaccggcagacattcagctcaaacggctgatggagcggaattcccttacagaagaagaagcgatgagccggataacgtcgcaaatgcctttagcggacaaaacaaaaaaagctgacgccgtcattgataacagcggcagtcttgaatatacaaagcaccagcttgaggaagtattgagcggctgggcataaacaaacaccgctcggaaagccgaacggtgtttttctggttaaaaatcaaaattgtcagggtcaggaccgacacggaggttttcgttcagatcatcaatccgcttcatatcgtcagctgacagttcgaaatcaaagacatttgcattttcttcaatacggtgttttttagttgatttcggaatggtgatgacaccgttttgcaaatcccagcgcaaaatcacttgagcggctgatttgccgtacttctcagcgatctcctgtaagacgggatgatcaagcagctgcccttgcatcaatggcgaccacgcttcaagctgaatgccttgttcagtgcagaaagcaagcagttctttctgtgtcagacgcgggtggtactccacctggttgatcatcggcttgatttccgtttctttcatgagatgtttcagatggtgaatttggaaattgctgaccccgatcgccttgatgcgtccatccctgtagagggtttcgagcgcccgccacgcatcgatgtactttccttcgacaggccaatgaatcaaatataaatccaaataatctaaaccgagtttttctaagcttgtgtcaaacgcttttaacgtttcttcatatcctaaatcggcattccacacttttgacgtgacaaaaatgtcttcacgttttaatcccgcttcttgcagtccttggcggatgccttcgccgacaccctcttcatttccgtaaatcgcggcggtatcaacgctgcgatagccgtgcaccaatgccgttttcaccgcgttgacgagttccgcgccttcctctactttgaaaacgccgatgccgaaccaaggcatctctactccgttatgcaatgttgcttttgcttgtaaatgtgttgtcatgtatatattcctcctattagttgtctgttgaaacaatcaaaatgcgctgaagaaaaactcacctcctttcaagagcagtgcgatcccgcttttcaagcttcctgctccatccggttaatacgaccgcgctgagcaccatcagcgccccgatccaagcggtatgaatgattccgattgagtctgtaatgattccgccggcaaacgagccgatcgcgattccggcattgaatgccgcgatgtttaaggctgatgctgtatcaacggcgcttggcgcaaaacgttcactcagcatcacaacatatacctgaagccccggcacattcataaacgccaacagccccatgaaaataatggtgatcagcccggctgttttaaacggcgcggtaaaagtcagaacaaacagcacagcagcctggacaatgaacatataaaacaaggctttcagcggattccggtttgataaacggcctccaatcatgtttccgatagcaatcgcaattccgtaaatgagcaggatggccgcgacggtttctttctgaaaaccggttacctcctgaagaagcggagataaatacgtaaacacgacaaacgttccgccgtagcctaacgcggtaataataaataaaagcaataaccggccgtttgtgacgagtttgacctgctcggaaaatgcggttttcgtccctttacgcaaatgcgacggaacgagaagcgcgtttgtgaggaatgcgatgattcctaccgccacaatgacggcaaatgcgattctccagccgaattgctggccgagataggtgccgaacggaacgccggtcaccgtagccaccgtcagccccgtaaacataatggaaatcgcgcttgctcttttatgctccggcacgatattggcggcgattgttgccccgattgacatgaaaatgccgtgggaaaaagccgaaataacccgtgccgccagtaagacgccgattgaggaagcgctcgctgcgagtgtatttccggcgataaaaattaacatcacccagagcagcagcgttttccgtgacatgccggatgtgagagatgttaaaaccggcgcgccgatcgttacgcccagagcatacatggaaacggtaagccccgccgttgtcacaggtatatgcagatcttgagatataagcggcagcagcccgacgctgataaattcggttgtgccgatcgcaaaagcgctgacggctaatgccagcagcgctggtaaatagctttggcgatgtgaagacatctgttttcctccttgaacgataatgtatggttgaaatgatgccgggtaaacgatataagtataagagtacattccttttcagccggcaaatgtcattatgatcgatagaagtgtcattgaaaagaacgtacttttaagtgccataggcactttttagttcctatagatgaggaggaattaccgttgctgaagaaaaaatacaatatatccgtagaagcggcgcttgaagtgatcggcggaaaatggaagtgtgtgatcctctgccacctcatgcgcgggaaaaaacggacaagcgaattgaagcggcttatgccggacatcacccagaagatgctgacacagcaattgcgggagctggaagctgacggcgtcatcaaccggatcgtgtacaatcaggtgccgccgaaagtggaatacgagctgagtgaatacgggcacagtctggaaagaattttaaacgcgctgtgcgactggggcgcgatgcatattgctaaacggtacggcgaggtgtcttccgttttagaggacagcattttaaatgacaaattcaaagaaccgggacaaatataagaaaaaagcaggcagcctgagacgctgatcctgctttttttatggaagaaagatcattttatatgcaaaaaaaccgattgaacaacatattgatcggtataagggtggatttttatcaagttgtactggcggatttcttttaatgtgttatactatatataaataaaggtaaattagagtggcatattaaaaaggggtgacctgagtatgaaggtaaatgtagcaatcaacgggtttggaagaatcggaagaatggtgttcagaaaagcaatggaagatgatcaaattcaaataacagccattaatgcaagctatcccccggaaacgcttgctcatttgataaagtatgacacaattcacggcaaatacgatcaagaagttgagacctccgacgacagtctgatcgtcaatggaaaacatattatgctgttcaatcgccgggacccgagagagcttccgtggaaagaatgcggaatagacatcgtcgtagaggcaacggggaaatttaattcaaaagaaaaagcaatgagccatattgaagcaggagcgaaaaaagttattttaacggctccgggcaaaaatgaagacgttaccattgtcatgggagtaaatgaagagcagttcaatcccgatgaacatgtcattatttcaaatgcatcctgcacgacaaactgtcttgcgccggtcgtcaaagtgcttgatcaggaattcgggattgaaagcggcctgatgacgactgttcacgcttacacgaatgatcaaaaaaatatcgacaatccgcataaagatctgcggagggcgagagcgtgcggagaatccatcattccgacttctacaggcgccgccaaagcgctgtcgctcgtgctgcctcatttgaaaggaaaacttcacggtcttgctttgcgtgttcccgttccgaatgtgtcattagtggaccttgtctgcgatctgaaaacagatgtgtcggccgagcaagtgaacgccgctttccaaagagccgcaaaaacgtcgatgtacggaattcttgattattcggatgagccgctcgtttcttcggattataatacgaattcacactctgcgatcatcgacggactgacaacgatggtgatggaaggccgaaaagtaaaggtgctcgcctggtatgacaatgaatggggatattcctgccgggtcgttgatcttatccgtcatgtcgccgcgcgaatgaaacacccgtcagctgtgtagactaaagatcatggacatttgttagaaaaaaacccttaacggcatattcgcaaaaaacacaccttgcaaaataaacttaaacacagtatactatctttcgtgaacttcttgctcgtgactgcttcggaattacttaaagggttaggacctctccggactaactttcccccgtggtaaatggccgggtcagttctcggaaattcacttttttaattcttgttaaggggggtccatgattatggaaacaatggggcgtcacgtcatctccgagctgtggggatgcgattttgataagctcaatgacatggattttattgaaaaaacgtttgtaaatgctgctttgaaatcaggagctgaagtgcgtgaggtcgcatttcacaaatttgcaccgcaaggcgtaagcggagtcgttatcatctctgagtcacatttaacgattcacagttttcctgaacacggatatgcaagcattgatgtttatacttgtggagacctggatcctaatgtggctgcggattacattgcggacgcattacatgcagatacaagagaaaacattgaaataccgagaggaatggggcctgtacagattaaacaggcacaagcgaaagtactgtaattttcaaaacgcaaacacaagggagctaagctgaaaaagccattacgcgctttgaagctgatgctccttttctaatgtaaaaaaacagcattgctttttctttaagcattttttttgtaaaatagaaaagataaggccggtctatcggctctcccaacaaataggctcatcctagaaacgttggcgggcatttaccggaagcttgcgaaccgcattacagcaacgaaacagatgggagctgatccaatttgaaatgtccttcatgccagcataacggttcccgcgtacttgattcacggcctgcggacgaagggaaatcaatccgcagaaggcgggaatgcgaagcctgccattaccgcttcactacatttgagaagtttgaagagatgcctctgatcgtcgtgaaaaaagaaggcgtccgggaagaattcagccgtgaaaaaatgctgcgcgggttaattaaagcttgtgaaaaaaggcccgttcctttaaaaacattggaagacatgtgctttgatattgaaaaagagctgagaaaccaaggcgtatctgaagtcaaaagcgaacttgtcggagaaatggtaatggaccgtctggcgaaaatcgatgaggtgtcttatgtccgctttgcctccgtctaccggcagtttaaggatataaacgtgtttatcgatgaattgaaagatttaataaagaaagaacgctgagagagctaagagattgtgtctggctcttttctcatgagcaaaattggcatttgatagatcgcagaaacggtgtaaaatgagagtagaaacatatcggaaggtttgagaatcatggctgactattggaatgacgtattgcctgtagatccttatacggtcaaaagccgttcgcttcttcaggatgtcgacagacaggttttgacacatctgtaccagccgctgatcggttcttttgcattctccctttatatgaccttatggggggagcttgagcagaaccgcttgtggggagcggaatccacgcacaggcagctgatgggcatgatgcagtcaaatttaaaaaagattcatcatgaacagggaaagcttgaaggaatcgggctgctgaaagtgtatatccgggagtccgagcaaaaagagcggatgtttatttatgagctgcttcccccgctcagaccgaatgatttttttgaagacggcatgctgaatgtctttctttataacagagtcggtaaaacgaaataccagcagctgagacaattttacacgcatccttccgtcggcgcggacgcaagggaaattacccgtccgtttaatcacgcctttgcctcttttcagccgagtgaatggaaaatgacgcctgatatggaagaggcgatgaagctccccgaggactatgagacggcgtctgtcggacaagcgccttcctatacggtgacggaggaagtgtttgattttgagcttttcatggcgggactgtcagaaacgatgataccgcgtaaatcaatcacacaggacgtgcgggagagcattaaaaagctttcatatttatacggaatagatcctatctccatgcagcacgtcgtcatgaccgcaattaatgaacaagatacgataacggccgaagcgctgaggaaagcggccagcgactggtaccaaattgaaagaagcgggaagcttccggaactgattgataaaacacagcctgtcaccttgagagaaaaccggacggaaaaggacgattcattgaacggcgaactcatcgcacagcttgagaccatatcaccgagaaagcttcttcaggacattgcggacgggaccgagccgtcaaaagccgacttgcagattatcgccgatattatgttcgaacaaaagcttgagcccggcgtcaccaatgtgctgatttattatgtcatgctgaaaacggatatgaagctgtccaaaaactatatccaaaaaatcgccgcccactgggccagaaagaaagtcaaaacggtacgggaagcaatgaagctcgcaatagaagagcacaggcaatatcttgattgggcggacggcaaaacaaacggcgcggcgcgcagcaaaaaaaccgtccgggaagaaaagcgccctgattggatgaaagaagaagaaaccgggaagaaacaagaacagccggctctttccgcgcaggatcttgaagaacagaagaaaaaaatgatggaagaaatgaaaaaactgaaaaaatactctgcctattgagacagagaagcggggtgatattgaatggaaccgatcagccgatcattagaaggcgtgacgaaaagacctgactttcaaaaacgcctggaacgaatgcagcagcaagtcatggccgacgaagacgtccaggcttttttgaaggaacagaaagatgtaatcaatcaaagcatgattgacagaggattaaataaactgtacgaattcgttcagcaaagcaagcagtgcgccttctgttcgaaagacagccggacgaacagcctgcttgaaggctatcatccgaagcttgtgatcaacgggcgttccatcgatattgaatattacgaatgtccggaaaagagaaagctcgaccgccagaaaaggcaaaagtccctgatgaagagcatgtatatccagcaggatcttctcggcgcgacgtttcagcagatcgacattaccgatccgagcagagtcggcattttccagcatgtgacggattttctgaagagctataatgaaacgggaaaaggcaaagggctgtacctgtacggaaaattcggaatcggaaagacatttattttagccgccattgctaacgaactggcggaaaaagagtattcatcaatgatcgtatatgttcccgaatttgtcagagagctgaaaaactcgctccaggatcagtcattggaggcgaaactgaatatggtaaaaacgacgcccgtactgatgcttgatgacatcggagcggagtcaatgacaagctgggtcagagatgaggtcatcggcaccgtgcttcagcacagaatgagccagcagcttcccactttcttctcgtctaatttttcaccagacgagctgaagcatcattttacgtattcacagcggggagaaaaggaagaagtaaaagcggcaagactgatggagcggattttatatttggcttcgcccatccgtcttgacggggaaaaccgccgccgttcatgatgccggcgtccaatgggaaggatttgagggaatgaggaataagaaggctgtcacttgggctgcggctgcggcgggagcgggccttttgctgtgggcaaaccgcaaatatctgaatctgtcgcctaaggagatccggctgtgggtattatcgttcggtatttttgcgccgcttgtgtttatcggaatttccatcgtcaggccttttgtgctgtttcccgtatcaatcgtttccgtcgccggaggattggcgttcggcccgtttttcggcaccgtgtatacgctggcgggctcaatgggcgctgccgccgcgtctttttttgcggcgtggctgtttgcctttaatgagaaaaaccgtcatggaaaaatggaagccattcaaaagcagatgaaaaccaatggcttcttttatatttttatcctgcgcattctgcctgttaactttgatgtgatcagctatgccgcgggcctatcgaaagtcaggccgatgacgtattttttggcgaccgcagcgggcatcattccggggacgatcgtcctgaatgtgctcggcgcgagctttatgtccggcaatgtgctgaccgtactctgcgtgatctgtctttacatcgtatttttatcgcttcccgttatatttaaaaagaaggtgcgccatttgttcggcggtgaaagctaacctttacgtctattttaaaaacatcccccatatacttgtaacagatgccgtaaggggggacaaatatgcttgaagtgatctttgaagatgaccacgataccgccgcttttttacatctcattcagcaatcggacgaccggagacattttattgtccgtgaaggcataaaaaaagtcggaatcgcaaggtctgaaacggctttttgcgttcagcgctttattgagccgatacttgtcaggttttttttggaatgcaaagaagacgagcatatgctttcgcttattgaggatgcatactgcttcaccgatcaggatgaacagcagcaaatccttcagcttgcacacagcattatggaaggagagcttgatgatcatccgttcgagccgaagaaagagccgcgcacacagtttatttcagatgcactccggacgatttcacttgatgcgggtgttttttccgtgcgttcgtttcagacgttccggctcggcaggtattatgagcggctcagagaatacgcggaggctgcgatagatgaataccggatggaacaggaatatcaaaactttatccagtctctgagagattatgtgacatccaatccgccgcggatgaagaaagtccgcatcgtacatgaccgggcttttacgctgtgggagctgcgctatttgtcagaacgggaacagaaaaaatacatagacagacggtttgtgcgggagcacccgatgtatatagattcccatctccttgcgcctctgatctccattgcgcctgagacggtagaactgtatacggacaaaccggagcatatgatgtccagaacgattcaaaacgtgtttcaggagagggtgcgccttttcccgctgggcgcgtttgcagccgagaagacggaaggatagccgtacggacggccttgcgtaggcggcagggctgtctgtgcgaaatcagacggaaaaaaccgagttgcatttttctcgcagacattttataatacataaaagattaatgattgctacacgtattgataaggacatgaagcattgataccggctttataagagaggagagccctaggctgaaagctttccagctatggatcattgtctttaccgcctttgaacttcagctgtgaacgccggaagaagcgccagtaatagctgacgggaactcccgttacagagtttagagccgcaggtgccgaaacaatcgaccgcgcggaaaaaagggtggaaccacgattccgtttatttaacctcgtccctttcatagggggcggggtttttgatttgcataaaaaaaggagtgacgaagatgtcagatatgatcaacatcacatttccggacggagcggtaaaggaatttccgaaaggaaccacaacagaagatatcgcggcatccatcagtccgggattaaagaaaaagtctttagccggaaaactgaacggacaggaaattgatttaagaacgccgattcaagaggacggtgccgtagaaatcattacagaaggcacagaagaaggcttgaacatcatgcggcacagcacggcgcatttattggcccaggcgattaaacgcatttataaagatgtgaaattcggagtcggccccgtcattgaaaacgggttctattatgacgttgaaatggagcaggcgctgacgccggatgaccttccgaagattgaaaaagaaatgaaacgcatcgtcggtgaaaatctgccgattatccgaaaagaagtgagccgtgatgaagcaaaagccatgtttgcggaaatcggcgataatctgaagcttgaactgctggatgccatcccagaagacgaaacggtctccatttatgagcagggcgaattttttgacctgtgccgcggcgtgcacgtgccgtctacaggcaaaattaaagaatttaagctgttgagccttgcgggcgcgtactggcgcggcgacagcaaaaaccaaatgcttcagcgcatttacggcacggccttctttaaaaaggatgacttgaaagagcatttgcggatgcttgaagaagcgaaagagcgtgaccaccgaaaactgggcaaagaattaaaattgttcgccaactctcaaaaagtcggacaaggcctgccgctctggctgccgaaaggcgcgaccatccgacgcgtgatcgagcgctacattgtggataaagagctgagcctcggttatgagcacgtctatacgcctgttctcggaagcaaagacctgtacgaaacatcagggcactgggatcattatcaggatacgatgtttccgccgatggaaatggacaatgaaacactcgtgctccgtccgatgaactgtcctcaccatatgatgatttacaaacaggacattcacagctaccgcgagctcccgatccgcatcgccgagctgggaacgatgcatcgttatgaaatgtccggggcgctttcaggtcttcagcgcgtacgcggcatgacgttaaatgacgcgcacattttcgtccgccctgaccagattaaagaagaattcatccgcacggtccgtttgattcaagacgtatacgaagacttcggcctgaatgattacacattccgcctgtcttaccgcgatcctgaagatacggaaaaatattttgatgatgatgagatgtggaacaaagcgcagtccatgctgaaagcggcaatggatgagatggggcacgactactatgaagcggaaggcgaagcggcgttttacggccctaagcttgacgtgcaggtgaaaacggcgatcggcaaagaagagacattgtcaactgtacagcttgacttccttcttccggaacgctttgatctcacttacgtcggagaagacggcaaacagcaccgtcctgtcgttattcaccgcggcgtcgtgtcaacgatggagcgtttcgttgctttcttaatcgaagagcacaaaggcgcccttccgacatggcttgcgccggtgcagttccaagtcattcctgtttcaccgtccgtgcatcttgactatgcgaaaaaagtgcaggagcgcctgcagcgtgaaggcctgcgtgtcgagcttgacagccgggacgaaaaaatcggctataaaatccgtgaagcgcaaatgcaaaaaatcccgtacatgcttgtggtcggtgaccaagaagcggaaaacggcgcggtaaacgtccggaaatacggcgagcagaaatcagaaaccgtctcattggacgattttgtgaaaaaggctgtagccgaagcgaaaaaataaccagaaatacaaaaaaccccgttcatccagaatggggtttttttgcgtataaaattatctttctttttgtttctctataattgcaaacagctcgtgaagatcgctgatcacgtaatcaggcgcaatgtccgtatcatttttcttttgcgtccggtttacccagactgttgtaatacctgcccgtttcgctcccaatatatcagtattgaggttatctccgaccataatggcgtcttctttttccaggttcaggaggccgaggcaatgttcgaatatggaggcgtcgggtttcccttttccgaaagcgcctgagatgacgatttcattaaaataaggcgcgagctcaggaacgccggcgagtttttctttctgcaggctgggatcgccgtttgtcagcagaagcaattcataaacacctttcagcttatcaagcactgcaaacgtttcatcatacacgtacggccgctgtctgcgttccgccgcgaaaaactccgccaaatattcgccgtaagccgcatcgtctataccgacactttttaagccgttcgtccaggcgtttcgtctgtattccggcgcaatccgattcagctgtttaaatccttcgctgaccggctcggaaaaattcgcccataatccttcaaacggattaatgccgatcatgaccgtataaggataggtttcgtatgacatatacaattcccgtgccgctttccgaaccgcctcttcaaatgtatgcgggtcaaggccatattttttttccgcttgtaaacatgtttccctgaatgttgttctgacgcttttttcatcccataacagtgtatcgtccaaatcaaaaaatacggctttcatgatcttctcctctttgttatattctgaaactctctgccgcaaggctcccgtttattctacaatagatatatagactgtgaaagatttgttttcagatgatttgaaaaaaacaggcaggtttgtgtcagattctgtctcaggctctaaaacgtgataaaataaaatttgaaagaacaggtgaaaagtatgctgcatttgatcatcatgatgctggaaagagtcggaattatcgtcatattgggatttgttctggctcataccagattgttcagacaggcgctccagcagcctgagagctataaaggcaaagcggtgctgatttcaattttctcgctgttcagtatcatcagcaactatacgggaatagaaattcagcggaatacaatcatgaataatgactgggtgtttcaaattaatccgtccggttcaattgccaatacaagaattatgggcgttgaaatcggcggactcttaggcggcccgtatgtggggatcggcgtcggcatactggccggcctgcatcgtttatcactcggcggcgcgaccgcagtcagctgtgccgtctcatccgttttagcgggcattttgtccggctggatcggacggtatttcagaaaacgctatgcgatgccgacaccgcgggtggccgcgcttgtcggactcgggatggaatcactgcaaatgctgctcatcctcttgatggccaagccgttttctgatgcttggacgcttgtgagcatcatcggcatcccgatgatattggtaaacgggtcagggacttttatttttctttcgatcattcagtcgattatcaggaaggaagaacgggcgagagcccttgaaacccatagggtgctgatgattgccgatcagacgcttccgtttttccgccaggggctgaatgaaagctcatgcaaaagcgtcgccgccatcatccacaggcaaacaggaacggacgcggtatcgcttacggataacgaaaagattttggcgcacgtcggcgcgggtgccgaccatcatattccgtctgaaagcctgattaccggattgtcaaagcgcgtcattaaaacgggtcatattatgaaagcgacatcaaaggaagaaattgaatgcacgcacgatccttgtccgctgcatgcggcgattgtattgccgctgacgtcaaacggcaaaacgatcgggacgctgaaaatgtactttaaaagcccgtcaggtttaagccgggttgaagaagagcttgcagaaggactcgccatgctgttttccacccagcttgaactcggcgaggcggaactgcagagcaaattgctgaaagacgcagaaataaaggcgcttcaagcacaggtcaatccgcattttctgtttaatgcgatcaatacgatttctgctctttgccgtacggatgtggaaaaaacccgaaagcttctgctgcagctcagcgtctatttccgttccaatctgcagggggcaaggcagctgctcatcccgctttctaaagaactaaaccatctgcaggcatatttatcattggagcaggcccgttttcccgggaaatataaaatcagccttgaaatcgaacgcggtttggaggacatcgaaattcctccttttgtgctgcagatcctcgtcgaaaatgcgctccgccatgcattttcaagaaagcaggacagctgtgccgtcaatgtcagcgtggtatccgcccgtcagtcggttttaatgcgggttggagataacgggcggggaattgatccggaattgctgtccgtgctcggaaaccgtccgctcccgtctaaagaagggacgggaaccgcgctttacaatttaaatcagcggctgatcgggctgttcggccccaaagcagccctgcgattggaaagtgaggccggcaaaggtacggacgtatcatttgagctgcctttgaaactgatgactaaaggagaagaacatgctgaaggtgttaatcgttgatgatgaaatgctggcaagagatgaattagcttatttgctgaaacggacgaatgaagtaagtgacataaacgaagcagaaaatattgaatccgcttttgacagcatgatggatcaaaaaccggatctgctgtttttggacgttgatttgtcaggagaaaacggatttgacattgccaaacggctgaaaaacatgaaaaatccgccggccgtcgtttttgcgacggcgtatgaccaatttgctttaaaagcttttgaagtcgacgcgctcgattatttaacgaagccttttgatgaagaaagagtgcgccagacgatcagaaagtttaaaagagtgaagcaggacagggcaggaggcgtctcagagcagccgtccgcagccggagcgcataaactggctgtatcagccggtgaatctattgtcattttagatacgaaggacattattttcgccggcatggaagacgggcacgtttccgtcaaaacgtttgccgcgtcttattccgttcatgaaactttggctgtcattgagaaaaaactgcctgatacggggttcttgagagtgcaccgcgcgttcatcgtgaatacggagcatattacggaaattcatccgtggtttaattcgacgtacaatcttatcttaaaagacggctctaaaattcccgtcagccgtacatacgccaaggacttaaaaaagctgcttcatattatatgaggcggcttttgcatttcagcagccgttttttgcatttcagaatgaatattcagccgtttactatgaaagcgctttaaatatcgatttctcttttataatggacctaacaaagagaaagaggtgaagaaaatgagtgcgaaaaaagtgtacggatttctgacacaagcatttatttttgccgtaattatgctcatatctaatgggattgcagcgattgtccccattcctatacccgcttccgtagtaggtttggtgttattatttgtcctcttatgtctgaaagtgattaagcttgaacaagtagaaacgctgggaacatcattaacgtcactgatcggatttttatttgtcccgtcgggcatctccgtgatgaattcacttggcgtcatgcagcagtacggcgtgcagattgcactcgtcatcttactcgccaccatcattctgttaggggcgacgggccttttttctcagctgatcttgtctgccagccaaaaacgtcagaaggcagctcctgaaaaacaaacggtgcgccgttccaatcaggaaaaagaacttgtgcagcattaggagggaaatcggatgagtccatatttcggtattgtcgtttcacttgcggcctttggcatcggcacgtatttatttaaaaaaacgagaggctttttcctcttcaccccgctgtttgtcgcgatggtgcttggaatcctttttctgaagctcggcggtttttcatatgaagattataaaagcggaggagacattattaaattcttcctggagcccgcgacgatcgcttttgccatccctttatacaaacagcgtgacaaactgaaaaaatactggtggcagatcatgtcttctatcattgtcggctctatctgctcagtgacgattgtctatttgatcgcaaaaggcattcatcttgacgcggccgttatgaaaagcatgcttccgcaggcggcgacaacggcaattgcccttccgctgtcaaaaggaatcggcggcatcaccgatatcaccgctttcgccgttattttcaacgccgttatcgtctatgctctgggtgctctattcttaaaactgtttaaagtaaagcacccaatctctaaaggactggctctcggcacatcaggacacgcactcggtgttgcggtcggtattgagatgggggaagtagaagcggcaatggcaagtatcgcggttgtcgtcgtaggagtggtgacagtgctggtcattccggtattcgttcagctcatcggaggataaacccgggtcatagacccgggttttttattgtccggcagcatctgcaggcggcaaagaacgaaatttcacatttttccttgcgctcacactggcatcgtgttaaaatgaaaaagttgatccggagaagtcattcttgactaatgatccggtattgtgtaaaatagttattgaattgaatataaatcacaagcagaggcacccgcttctcacctgattgacacattcatgtagttggcaggttgaccgtacatttttatttatgcagatgttcgtagtgtgggtgtgttgtcatgcccgcactttttgtttgcctgcagaatgcagtcaaaaagcgttgtgaatcaattcgaagaaactatggaggtggctcattattagcaaagatcaattggttaatgagggtatccgtgcacgtgaagttcgtctgatcggacaaaatggcgatcagctcggcatcaagtcccgtcaggaagcacttgaaatcgccggccgcgcaaatcttgaccttgtgttagttgcagcaaatgcaaaaccgcctgtctgccgcatcatggactacggtaagttcagattcgagcagcagaaaaaggacaaagaagcacgcaaaaatcaaaaaatcattaacttaaaagaagttagattaagtccgacgatcgatgagcatgactttaacacgaaattgcgcaatgcgattaaattccttgaaaaaggcgataaagtgaaagcttctatccgctttaaagggcgcgcaatcactcataaagaaatcggccagcgcgtattggaccgtttctctgaagcatgtgcggaagttgcgacagtcgaaacaaaaccaaaaatggacggccgcagcatgttcttaatgctcgcgccgaaaaacgaaaagcaataaggaggaaatcccatgccaaaaatgaaaactcaccgcggatctgctaaacgttttaaaaagacaggttctgggaagttaaaacgttctcatgcatatacaagtcacttattcgccaacaaatcccaaaagcaaaagcgtaagcttcgcaagggtgctattgtaagcgcaggagacttcaaacgtatcaaacaacagcttgctaacatcaagtaatcggacaaggaacaattaggagggaaatataatgccaagagtaaaaggcggaactgtgtcgcgtcagcgtcgtaaaaaggttcttaaattagcaaaaggttatttcggttcaaaacatagattatacaaagtagcaaaccagcaggtcatgaaatcaggaaactatgcattccgtgaccgccgtcagaaaaaacgtgatttccgtaagctttggatcactcgtatcaacgctgctgcacgtatgaacggtctttcttacagccgtttaatgcacggtcttaagctttcaggcatcgaagtaaaccgcaaaatgcttgctgatcttgctgtaaacgatcttactgctttcaatcagcttgctgatgctgctaaagctcagttagacaagtaagttgaaaaagccgctctctttccgggagcggtttttttacgtaaagggtgacaatcaatggctctcttcatttacgccgtattgataaacggatacggcttttggatcatgggcgctgataaaagaagagcaaaggcacaccggtggagaatatcagagaaacgaatatggctcacagccgccatgttcggctcactcggcgtatggatcggcatgcgcaccttcaggcataagacgaaacacaaatcctttttatacggggtgccgctgctttttctcactgaagccgcccttgtgctgatgtatttgatgtataaaacataaaaagcaggagagcttatcgctcgcctgcttttttcgcttttttgatgggctggtcccaatcaatcttgcaattcggataccgctccaatacctttttttcgacttcttcaaaatcacctgcagaaaagcggttcagcttttccggattttcggtccatacaaatatcgtatgaataaacagcggatgatctttggaagggatatgcttttctccttcaaagagcactcctttataagtaagctggagattttttcgcgtgtttttctgttcgtcaataaaataaaaattctcttttgattgtgccagtctgagccttcttttcgggtttgcgtaaaatttgacgcacatgtaaataaaataaataagaagtgcaagcaagacaatcctcaatactgtaatggccatatgtgtgaaggcacctcctcacctttgtcatgatctgatgtaatacgaaaaacaaaacaaaaggtttcatttttttaaaagaaatagataaaaacatttacccgtttttcaggcgaattaatcgtatgcttcagcattggttttgtataataagaagggtagtgaaaaaaaggaggtttattgatgacaaaattagatgaaacgctcaccatgctgaaagcgttaacggatgcaaaagggataccgggaaatgagagagaagtaagacaagtgatgaaatcatacatagaaccatttgccgatgacgtcacaacagaccggctgggaagcttaatcgccaaaaaaaccggcaaagaaaacggtccgaaaatcatgatctcagggcatttagacgaagtcggttttatggtgacgcaaatcactgataaaggctttctccgctttcaaaccgtcggcggctggtggtctcaggtcatgctggcccagcgcgtcaccgtcgtgacaaaaaaaggggacatcacggggatcatcggttcgaaaccgcctcacattctgcctcctgacgccagaaaaaaagccgccgatattaaagagatgttcatcgatatcggggcgtccagccgtgaagaggcaatggaatggggcgttcttccgggtgaccagattgtgccgtattttgaatttacagtgatgaacaatgaaaagcatttattggcgaaagcatgggacaaccgtatcggctgtgcgattgccatcgatgtattaaaaaatctgaaaaacagtgatcaccccaatgaagtatacggggtcggaaccgttcaagaagaagtcgggctgcgcggggcgaaaacagcggcacatacgatccagcctgatatcgcgttcggtgtggatgtcggaattgccggagatacaccgggaatttctgaaaaagaggcgcaaagcaaaatcggcgaagggccgcaaattattctgtatgacgcatcaatggtatctcacaaagggctgcgcgaccttgtcgtgaacacggcggaagaagcgggaattccgtatcaattcgattccattgccggagggggcacggattcaggttccattcacttaaccgcaaacggagtgccggcgctgtccattacgatcgcgacgcgctacattcacactcatgccgctattttgcatcgggatgattatgagaatacggtaaaattgatcacagaagtgattaaaaaattagatcgggaaacggttgaccgtattacttatcaataaagatacggaagaatctgcttttttaagcagattcttttttttatatgtacaaatatgagccctgcgtctacaataagagaagacatagaaaaatttgacaacacgtttttgaaagcgctttaaaaaaggggaggatttacaaatgaaaaacagattcagacgcatgatccgcttttcgtgcgcagccgttacagccgggctgctgatgatgtcttcatctccggcatctgccgcgttttggggggcatcaaatgaattgcttcacgatccgacaatggcgaaggaaggaaacacgtggtacgctttcggaaccggtttggaaggggagaggggacttcgcgtcttaaaggcgggcagcggcggcgtatggaccgttcagaaatcaatttttaattctccgctgtcatggtggggcaattatgtgccgaattacgggctgaatcaatgggcccccgatgttcaatattttaacggaaagtattggctgtattatgccgtttcttcattcggcaaaaatacctcctcgatcggtcttgcatcatctgcaagcctcagttcgggaaactggaaggacgaagggctcgtcatccgttcaacaagcgccaataactacaatgcaattgatccggagctgacaattgataaagacggaaacccttggcttgccttcggttctttttggagcggcattaagctgacaaagcttgataaaaatacaatgaaaccgacgggatcactttattccatcgctgccagaccgaataacggcggagctttggaagcgccggcgatcacttaccagaacggctactattacttaatggtgtcgtttgataaatgctgttcaggcgtgaatagtacgtacaaaatcgcttatggaagaagcaaaagcatcaccggcccatatctcgataaaagcgggaaaagcatgtctgaaggcggagggacgattcttgattccggcaatgaccgctggaaaggcccgggcggtcaagacattgtgaacgggaatattttagtgcgtcatgcgtatgatgccgaaaacagcggaattccgaagatgctcatcaatgatatcgattggagttcaggctggccttcctattaattgagcagccgggcatgtgtgtccggcttttttacttgcaataaaagattgacagtttgattcctccttaactataataaaattgttcgtacaaataaaaggattaaagttttgtagtttatattcgtacgtatgttttttttaaaaatgcaagcgctttattttgatgggaaggggaaatgaatgtgcttcagaacaaagaatatgaattttggtttgtaacgggaagccagcacttatacggagaggaaacgctgaagcttgtcgataaacacgcaaagggaatatgtgacggcctcagcggggtgtcatcaagatacaagatcaggcataaaccggttgtcacgtcatctgaaacaatcagagaggttttgcgggaagcgcagtatcaagaaaactgtgccggggtcgtgacgtggatgcatacattttcccctgcgaaaatgtggattgaaggtctttccgcttttcaaaagccgatgcttcatctgcatacccagtatcatcgcgacatcccgtgggaaacgattgatatggactttatgaacagcaaccaatccgctcacggagaccgggaatacggatatatccagtcaagaatggggcagacgagaaaagtcatcgcaggctattgggatgatgaggaagtcaaacatgacatttcgcaatggatgaacacggctgccgcttggaatgaaagcaggaatattaaagtagcccggttcggcgacaatatgcggaatgtggcggttactgacggagacaaagtcggcgcccacattcaattcggctggcaggttgacgggtacggaatcggcgatcttaccgaggtgatgaacaacgtcaccgacgcagaaattgaggcgctttatgaggaatacgacaacttgtatgtcatcagcgacgaaacaaaacgggatgaagcaaaagttgcttccattaaagaacaggcgaaaattgaactcggattaacggcctttctcgaacggggcggatatacagcgttttcgacctcgtttgaagttttgcacggaatgaagcagcttccgggtcttgccgttcagcgtctcatggaaaaagggtacggatttgccggcgaaggcgattggaaaacggctgtccttgtgcgaatgatgaaaataatggcggacggagaacaaacctccttcatggaagattatacgtaccattttgaaccggggcgtgcgatgattctcggatcacatatgcttgaagtatgtccgacgatcgcccttgatcagccgaaaatcgaagttcatcctctctcaatcggagggaaggaagatccggcccggttggtctttaacggaatcggcggttcagccatcatcgccagcatcattgatatcggcgggcgattccgtctcattctgaatgaagcggaaggcagggaaattgatcatgatatgccgaatctccctgtggcgcgggtgctgtggaagccggagccatcgctgaaaacagctgcggaagcatggattttggcgggaggcgcccatcatacctgtatgtccttccggcttacggctgaacagatgcttgactgggctgagatggcaggcattgaaagcatctttatttcccgcaataccgaaatacatgagctgaaaaaagagctgaaatggaatgacgtattataccggttgggagggaattgatatggcgtatacgattggtgttgatttcggcacattgtccggccgggcggtgcttgtcaatgtccgcacgggcgaagaaatcgcgtctgcggtaaaagaatatactcatgccgtcatcgaccgcacgctgccgaagacgggtgaaaaactccctcgggactgggcgcttcagcatcctgccgattatatcgaagttctggaaacggcgattccgaacctgcttgagcaggcgggcgctgatccaaaagacgtgatcggcataggaattgattttaccgcctgcacgattttgccgatagacggcgcggggcagccgctttgtatgctgccggaatttgaacgggagccccatagttatgtgaagctgtggaagcatcatgcggctcaaaaacatgcagaccgtttgaacacgattgccgaagacacaaatgaaacattccttaaaagatacggcggtaaaatttcttccgaatggatgatcccgaaaatcatgcaaatcgcggaagaagcgccgcatatatacaaggcggcagatcagattgtggaagcggcagactggatcgtctatcaattgtgcggttcattgaagcgaagcaactgcacggccggctacaaagcaatctggaatgaggatacggggtatccgccggatcattttttcgaaaggctcaacccgttaatgaaaacgattacaaaggataaattaagcggctccatttattcagtcggggaaaaagcaggaggtttgaccgaaaaaatggcggagctgaccgggcttctgccggggacggccgttgccgtcgccaatgtcgacgctcacgtgtcagtgcccgcggtcggtattacagagccggggaaaatgctgatgatcatgggaacgtctacctgccatgtgctgctcggcgacgaagaacatatcgtccccggtatgtgcggggtcgtcaataacggcatcttgcccggatatgcgggatatgaagcggggcagtcctgtgtcggcgaccactttgaatggttcgtcaaaacgtgcgttccgagagactatgagaaggaagctgaggataaacacatagacattcacgagctgctcagcaaaaaagcagctgaacttgttcccggggaaagcggccttctcgcgcttgactggtggaacggaaaccggtcaaccttggtggacgcagatttgacgggcatgatgctcggcatgacgctgcatacgaagccggaagaaatctacagggcattgattgaagcgacagcgttcggaacgaggatgattatcgaaacgttccgggaaaacggcgttccggtcgaagagctttacgcagccggaggaatcgccgaaaaaaatccgtttgtcatgcagatttatgcagacgtcacaaatatggatattaaattatccgggtctccgcaggcgcctgcactcggctccgcgattttcggagcgctcgccgcgggacgggaaaacgggggattctccaatattgctgaagcatgtgcgcatatggggaaattaaaagacggcttttatgccccgaaccgggaaagagctgagatttatgacagcttatatgcggaatataaagagctcgtacactacttcggcaaagaaaacaatgtcatgaaacgcctaaaagccattaaaaaccgtgattttgcgaaaggagggagccgccatgcttgaagcgttaaaagaagaagtgctcgctgccaacctgaagcttgaggaacataaccttgtcacgtttacatgggggaatgtcagcggcattgacagagagagcgggagaatcgtcattaaaccgagcggtgtcgattacagtgagctgaccgctgacaaactggtcgtcctgaatgaggacggagacattctcgaaggctcgctgaaaccgtcttctgacacgccgacccatctttatctgtataaagcgtttccggcgatcggcggaatcgttcatactcattcccgctgggcgacgagctgggcacagtccggaagagacatacccgctctcggaacgactcacgcggattactttgaaagcgctataccctgtacgagggaaatgtatgaagaagaaattgtgaaagattacgaatatcatacaggcaaagtcatagccgaaacctttcaaaacgaaccgtatgaacaaaatccgggtgtcctcgtccacagccacggcccgttctgctggggaacggacgcgctgaatgccctgcataacgccgttgtgctcgaaacggtagcggaaatggcctaccattcgcttatgctgaacaaacagctcagtccgatcgacagagtgctgcacgacaagcatttttacagaaaacacggggcgaatgcttattatggccaaacttgacgcagccgggtttctgattgatttagacggaaccgtattcagggggcgggagctgattgacggcgcaaaagaagccgttcatacccttcagtcactgggcaaagccgttgtctttttaagcaaccgcggcaatctatcaagagcaatgtgccgaaagaaactgctgggtgccggtatccgcacggatgaacggagcatcgtgctgtcctccagtgtgacggcatcatttttaaagaagcattatcctttgtcaaaggtgtgggtgttaggagagaaagggctgactgatgaactcgctttagcgggtgtcgccttggcgcaaaacccgcaggcggctgactggcttgtcatctccctgcatgaaaccgtcacctacgaagatctgaatctcgcttttaaggcggcttcctccggcgcgcgcatcatcgccacgaaccgggaccgctcctttccgaatgaaagcggccatgccatggacgtcgcgggaatgatcggggccattgaagcatccgccggagcaaaaacggagcttgtcatcggcaaaccgtcttggctgatggctgaggcggcatgtgaagcgctcggacttccccctgaggaatgcgccattatcggagacagcctcgaatctgatatcgcaatgggcaggctgtacggaatgaaaagcgtattggttctgacggggtcggccaaacttggggagccccgtctatatgaacctgacatcgtccttgattctattaaagacctgacaggattagcgaaggagggaatccttttatgaaacgttctcctgaggacattcaatccgagtttgacaaggaaggggccagccgctcaccgattcaaatagaagatatcgtgatcggggcgaatgcaaaagaagagcttctcagatttctgcaaaaaaaatgctggaatcatccgctcatcgtctgtgaccggaacacttacgaggcggcgggacgtctgcttgcggaagaattgagggcaggcgggatcaaagcgtcaaaagtcatcattccggagcatgaagccggggccgccgcggctgatgagaggacattggtctatacgctgatcaatctcgcggaagagacggatgtcatcattgcggccggttcaggaacgattcacgatattacgcggtttgccgcttatcagcgcggattgccgtttatctcattccccaccgctccgtcagtcgacggttttacatcggctggagcgccgctcataataaacggaatcaaaacgacgattcaaacgaaagcgccgatcgccttatttgccgatacgaatgtattaaaagaagcgccccgttcaatgacagccgcgggcttcggagatatgatcggaaaaataacatcgctggcagattgggagatttcccgcaggcttgcgggtgagccgtactcagaagccggggcgaagcttgtgaaagacgcgctttggcagtgcattgatcaccgcgctgacattgccatgggaacggaggccggcattcagatactgatggaagcgctgatcgtttcgggtcttgtcatgcttgcgcttgaccactcccgccccgcctcaggaggagaacatcacatctcgcattggattgagatggaaatgctgaaggcaaaacagcctccgattctccacggtgcgaaggtcggctgtgcgtgcgcggtgctgagtgatatttacaaagaactggcttgtcacgaaaagcttgctgaactgccgccgcactttcgcgaggcgattcattctgcatatgaagggcttcccgacggcaaaacaattgccgggtggctcgcatctgcgggaggtcccgcctgtttcgatgagatcggtgtaaaacaggaccttgtcagcgatgcgcttaagcatgcgcacacactgcgagaccgttataccggtttaaccatcataaatgaaaatgcagcactctttgcacatcatttgcatctatagccgcgcggcctaaagtggaaggggtaatgacatgaaaaaaacgaccgctgtatgtttggtgctgatgatgctcttcttgtttaccgccggctgttcacaagaacggactgccggccggccgggagaaacggagctgacgttttggacgtttaacggtctgcacgaacagttttatcaggaaatggtcaaagaatggaatcagaaatatccggagcgcaaaatcaagctgaataccgttgtttatccttatggacaaatgcatgataatttatcggtttcgctgatcgcgggtgaggggcttcccgatatagccgacgtggaattaagccggttctcgaactttctgaaggggaaggatatcccgcttgccgatctgacgccgctgattgaaaaagaccgcgataagtttgtggaagcgcgtctggccttgtacagcaaaaacggaaaattgtacggccttgatacacatgtggggacgaccgtcatgttttacaacatggatatcatgaaaaaagcgggcgttgatcccgcctccattaagacatgggaagattaccggcgggcagggaaaaaagtgcgtgaagcatctgggaaaccgatgggaacggttgaaacaaacgactccgccacattcctatccatgatttcgcagcaagggtcaggctactacagcaaaaacggaaaattgattctgaacagcaagacgaatacagacacactgaattatgtaaaggacatggtaaatgataaaacccttctgccggctcccggcggcggccatcacagcgaagaatactacggttttatgaatcagggcggggcagcctcagtgctgatgcctatttggtacatgggacggtttatcgattatatgcctgatttaaaaggaaaaatggcgatttaccctatgccggcctggaaagaaggcggtgacagatcagcgggtttaggcggaacagccaccgtcgtgccgaagcaggctgaacatctgaatctcgcgaaagaatttctcggttttgcgaaaggttcaaaggaagggaacataaagctttggacggtgctcggctttgacccgctccgctgggacgtgtgggattcaaaagaattgaaggagaaaaacaagtacacggatttcttccggaacggtacgtcaattttttcctcgctccttgaaataaaagatgagatcaatccgatttatctgcatgaagacttctctaaagcggctgatcttgttgtcagacaagtgctgttcgatgcgctgaagacgcaggaaaaaacacctaaggaagccttggacgaggcggcagagcaattagagaaataggagaagccgccctatttaacagtgaaagcgggggagcttttatgagacctgtaaagacagagacagcgcaaaccgtttctgcagtccggaagaagccgcgccggcgcaatgtgctgtattcaaaaaaagcggcgccttatctttttacggcgccatttatcatttcgtttctcgttttctttttgtatccgatcatcagcgtgtttatcatgagctttcagcggatactgccgggagaaattacatttgtcgggttttccaattataccgctcttcttaatccaaccttttacaccgcactgtttaacacattggaatataccttctggacgctgatcgtgctgattccggtgccgcttcttttggcggtgattctgaattcgaagctcgtcaggttcagaaatgtatttaaatcggctctgtttgtaccggctttaacatcgacgatcgtagcggggattattttccgtctgatgttcggagaaatgaatacgtcgcttgcaaacgagctgatgatgaagcttggcgcatcaccccaaaactggctcaacaacaaaggtaccggcatgtttttaatggtgctgcttgcgtcatggaggtggatgggcattaacattctttactttctggcgggattgcaaaacgtgccgaaagaattgtatgaagcggctgaaattgacggggcgagtacgtggaaaaagttccgtcatattacccttccatttttaaagccggtgtccgtttatgtgttaacgatcagtattatcggcggtttcagaatgtttgaggaaagctatgtgctttggcagaataattccccgggcaatatcggcctcacgcttgtcggttatttatatcagcaggggcttgcatacaacgaaatggggtacggggccgcaatcggaattgtccttttgcttgtcatcttactagtcagccttgtttcactgaaactgtccggttcgtttaaaggggagggataagcgttgcgtaacaatcacatgttttccgtgtacagagtcgcgtttaccttgttttttatcatgctgagcctgttgtatatctttccgatgatctgtctattgctcggttctttaaagccgtcatctgagctgatgcgcatcgggctgaatctgcgtcttgatccggatgtgatgagccttgataactacacctatttgttcaacggggggagcatttatttcaaatggttttttaacagcctgctgctcggcgttctcaccacggttctcacgctgtttttttcctctttgatcggctacggactcggtgtctacgaatttaagggcagaaatattattttcgttcttgtgctgatcattatgatggtgcctcttgaagtgatgatgcttccgttgttcaaattgacggtgggtcttcatttgatcgattcttatacgggggtgattctgccgtttattgtgtcgcctgtcgccgtgttctttttccggcaatatgcgctcggacttccgaaggatctgcttgattcagcgagaatggacggctgcacggaattcggcatttttttcagaattatggcgccgctcatgaaaccggcattcggggcaatgatcattcttcaatctttaaacagctggaataactttttatggccgctgatcgtgcttcggtcgaaagaaatgtttacgcttccaatcggactttcagggctgctgagtccgtacggcaacaactatgacatgctgatttccgggtccgtttttgcgatactgccggtgatcatcatattcttgtttttccaaaaatacttcatttccggcctcacagtaggcggagtgaagggatagagagagggaggaaataatgaaaaaagcggggattacagcagataaagaatatatcatcggtgaagtggacaaacggatgtacggatcatttatagaacatatgggccgggcggtgtatgaaggcatttatgagcccggacacccgaaagccgacaaggacggcttcagaacagacgtgcaggagttaatcaaggaattgcaagtgccgttcatccgctatccgggagggaattttctctcaggctacaattgggaagacggcgtcgggccggtgaaggaccgcccgcggaggcttgatttggcatggcagacgacagaaacgaacgaagtagggacgaatgaatttttaacgtgggcgaaaaaagtgaacgccgaagtgaatatggcggtcaatctcgggacgagagggatcgatgccgcccggaacctcgtcgaatactgcaaccatcctgaagggtcgtactggagcgacttacgaaaatcacacggatatgaaaaaccttacggcatcaaaacatggtgcttaggaaatgagatggacggcccttggcagatcggtcataaaacggcgcatgaatacggacggctcgccgctgaaacggcaaaggtaatgaaatggacggacccgacgatcgaattggtggcttgcggaagctcaaacagcggcatgccgtccttcatcgagtgggaggccgaggtgcttgagcatacgtacgagcatgtggattacatctcactgcatacgtattacggcaaccatgaaaatgatcttgagaactatttggcgaagtcgatggatttagaccattttattaaatccgtcacagccgtatgtgattatatgaaagcgaaaaaacgcagcaaaaaaacgattcacctttctttagatgaatggaatgtgtggtatcactcaaatgaagcggataaaaaagtggagccatggattacggcccggccgattctcgaagacatctacaattttgaagatgcactgttgatcggttcactgctgattacgatgctgcagcatgcggacagactaaagatcgcctgtctcgcccagcttgtcaacgtaattgcgcctattatgactgaaaagggcggagaagcatggagacagccgatcttttacccttacatgcacgcctctgtctacgggagagggacttcaatgaagctgctggtcacttccccgaaatacgactcagcggattttacggatgtgccgtatgttgatgccgcggccgtttaccatgaagaggatgaagcactgaccatttttgccgtcaacaaaagcaaggaactgatggaaacggagataaagctgagagggtttgaagattaccgcattattgagcatatcgtgctggagcatcaggatatgaaagcgaccaatcaaaaaaacagaaaagaagttacgcctcactccaacggaacgtcttcggcaaatgctgaagggataacggctcattttacgccgctgtcctggaatgtcatccgtttatcaggaaaataatgttccgaaaagccgggcttagccgccggctttttttatgtaaaaatcatctactgttatctgataattgtgataatatttagaaaaagagaaaaggggctgggattaaatgaatgcgattacaatcgtcatagcgtctatatgtattttggcgatcgcctatcggctttacggtacctttatgatggtcaaagtattaaaaatcaatgatcagacaccgactccggcccatgtgcttgaggatgggaaagattatgtgccgacgaataagtgggtgtcattcggccaccacttcgcggcaatcgccgctgccggcccgcttgtcggaccgattctggcagctcagttcggctatctgcccgggcttttatggctgttaatcggagcggtgatcggaggagccgtgcacgatattgtcgtattgtttgcatcaatgcggaaaaacgggaaaacgctttctgaagtcgccaaagaagagctcggcccagtggcgggtttttgcacgggtctctcgatgctgtttatcattacgatcacgatggcggggctgtccatggttgtgctgcacgcgcttgagaaaaacccgtggggaacgtttgcggtggggattacgattccgatcgcgatgggggtcggcctctattataaaaaaacgggcaatctcaaactcgcatcaactgtcgggtttcttttgttaatggccggtgttgtcatcgggccgtggctgcagacaacggctctcggggacatgctgacactggatgcgaaaacgcttgcagtggcgcttcctgtctatgcgtttttcgccgcggcgcttccggtttggcttttgctggctccgcgtgactatttaagcagttttatgaaaatcggggtttttgccgctttgatcgcaggcgtctttttcgtcaatcccgccattaaattcccggccgtaacggagtttattcacggcggagggccggtgatcgcgggtcctgtctggccgtttatttcaataacgattgcctgcggcgccatttcgggctttcatgcatttgtcggttccggcacaacgccgaaaatgctggataaatggagtgatataaagccggttgctttcggagcgatgcttgtggaatgtctcgtcggaattatggcgctcattgcagctgccgctcttgagcccgccgattattttgccattaacagcacgcctgaaatattccgcaccctcgggatgaatgtcgtccatctgcctgaattgagcaaagaaatcgggctcagtctggaaggaagaacgggcggcgccgttacgcttgccgtcggaatgacgtatatctttacggagattccgtttttcagtcatttggcttcatacttttttcaattcgtcattatgtttgaagcggtgtttattttaacggcgattgatgcgggaacccgtgtcgcccggtacttgattcaagagtttttcggagaggtctataagccgttgaaaaaaacagactggctgccgggctcgattttctcaagcgcgctcgcctgcctgctgtggggctatcttctgtattcgggcgacatcagctccatttgggcgctgttcggcgtatccaatcagcttatggcgtctgtcggcttaattatcggtgcgaccgtcgtattaaaaatagcggataagcggcgctatatgctgacatgcttgattcctctcgcttatttgtatgtgaccgtcaactatgcgagttattggatggtgcggtatgtgtatttgaaccccgaagcggcgggatacaacgtgctgaatggcgttttatccattatcatgctcattctcgggcttgtgattatcattgcggctgtgaaaaaatgggcgaatgtatggcgtgatccgagtgccagactggaagcttcaatacccggataaatccgcggccgtccgaacattgcacaatcataaaaaaagcagagagccgatcggtctctctgctttcatcttatgacaaatccgccgcttccaaaaggtaatccgccaaatgaaccgcgcggacacggcctgttaatccttcgcgtaaaatgccgagctgcatttgcagaaggcatccgggattggctgtcacgatgacggccgcctccgtttttccggcggctttcatcttgctgtctaatattttcatagacatctctgactctgttatattataaattcccgccgacccgcagcagctgtcggccttttccatttctctgtactcagcccctttaatgcttttcaaaagcgtgcgcggttcctctgacgtatgcatcacattgcggagatggcaggagtcctgatatgtgacgatatgaggagactgtgcccgcaggtttttttgatggaacttcagatcaaccagtacggatgaaaagtctttgagcttccggacgaattgttcggcacgttccgcccatccgggttcatctttcagtaaatggggatattcctgaagaaaggcgccgcatccgccggcgtttgtaatgatataatcagcgtcaagcgcttcaaaagccgcgatattccgcttggccagttcttttcccatctctttttctccgctgtgcccgtgaagcgcgccgcagcacgcctggccgtccggaaccgcgatttcacatccggccgcctgtaaaagcgccgttgtcgcatgatttgtcgctaaaaacattgtatccattaagcagcccgagaaaaaagcggcccgtttttggacgggacccgcggcaggaagaaaacgcggcctttccttcatgtctttccgtttcggggcgggcgggagcacttgttccattgtgcgcagatgttcaggcaaaacgcgcagcataccggtttttctgacggcggtctgcagtcccgatctttggtatattccgagaagattcacggctgtctgcatgcgattttggtgtgggaaaagcccggtgaaggcggctttccgcaagaggcgcacgcccggcttatgttttttattttgatgaatgatatccctcgcttcttcaagcagctgtccgtaattgacccctgccggacaaacgggctcgcatgcccggcatccgagacacagcgaaagtgagcgctcgacatcttcatcaggctcgatcagtccgtcagtgacggctttcatcagggcgatccggccgcgcggcgaatgggattcttgaaatcccgattcgatataggtcggacaggaaggaaggcagaagccgcagcgcatacagttcagcaattcaccttcatccatgcggtttttgaattctgtttgaatttgtttctgctctttagccgtggtcatttcatcaccaccacgcgtttccttgatgaattggcgaatatttttcccggattcagcagattttggggatcaagcgcttgtttgatcgctttcatggcggtgatgccttctgttttcagtttcatttctaaatacggcgcttttacgatgccgaccccgtgttcacccgttatcgttccgcccagctcaatcgctttttcaaaaatggcggcaaaagctttttcgacacgttccatctcctctgtatttcggatatcggtggtgcacgtcggatggaggttgccgtctccggcatggccgaatgtgcagatggacaagccgtatgtttctgcaatctcgttaatggctttgaccatgctggcaatttgcgatctcggcacggtcgcatcttccagaatcgttgtcggtttcagccgggcaagggctgataatgcggaccgtctggcctctgtaagcgcgaatgcctcttcctcggtttcagccgtttggacggatacggctgctccgtttttacagatggcttcgattttttccatatctcgtctgaccgtgtcgctgtcaccgtcctgttcgatcagcagcaccgcttttgcgtcggtcggaagcccgatcttggcgtaatcttcaatgacctgcagtgtcggctgatccagaaattcgagtgtcgccggaatgattttttcagcgatgatggcagaaacagattccgcagccgcttcaatatgttcatagagtgcaagcagcgtttttttcgtttccggcttcggaaccagctttaaagtcgcttccgtcacaacgccgagcgtcccttctgatccgacgaaaagccgggtcagatcataaccggcgacatcctttgtcagctttcctcctgtgcggatgatatcgcctgaagccaagacggcttcaaggccgagaacataatcccgggtgacgccgtacttcaaaccgcgcagcccgccggaattttcattaatattcccgccgatcgtcgatattttcatgctgctcggatcaggcggataaaataaacctttttgttcaaccgcacggatcatatcttgcgtgatcacgcccggctggacggttgccgtcaaattttcttcatcgatttccagaatgcggttcatatgtttgaataaaagcacaagcccgccttcagacggacatgtgccgccgcataagtttgtgcctgaacccctcggcacgatcggaatgtcatgcctgctgcaaatcgttaatatacgggacacgtcatccgcgctgcggggggcgatgaccgcatccggcatggcttgcagctgaggagctgcatcataagaatacacaagacggcccgccgctgaatcatcataattctccttcccgaccgtccggatgaacgcttcttttgcctctcgtgaaatcatgttctcccaacctccctgataagaaaagcgttttcatttaattgtaaagaaaaacgattccgcacactatggagaaacatatgaaaaatgatgatatgattacgtgctttttgtatgttgatctaaaaagcgcagcgccaaataaaaagctgttatgtcttcagggcggtcgagattcatatttgtcagtgattccagtttggaaaggcggtagcgcaatgtattgatatgaatatgcatgtcgtcggcggtgcgctttaacgataattgccggtcgaaaaaggcgcgcagcgtatccagaagttcttcccggccgagtacatgctcgagaacccgccgtgaaaattccgacctcgtgccgggtgtgatatcggcaagacacatatccagttttaaatcttcttcaaagacggcctgcttgtcaccgattccggctgaaagtgctttatccgcctgttcgtatgattccgtgaggcgctctcccggaacgatccgtccgatgccggcggtgacaggctgcccgaaaacgacgccgatctttttaatgagctgtgttttggaagccgaatttgcttcatgattaatgagaatgcgttcatttccccagcggacaaacaggtcttcagggcattcgtactgccagagccgcccgagctcctccgctttatattgctcataacggccttgaatgagtatgatccggcggtatgcgtgaaggtctgcgccgatgagctttgctttttctaaaaagcccggagaccattctttcagctgcagccaatcaaccataaaggattcaagcattctcgcacgccactgcgcttcttccatatggcgcgtttctttaataaacagctccgtcatttttctgagcaattctccgaaaggcaggatatcgtcagggtctcctgtcaggccgaatactccgatcacttcatggcctgaaaaaacggggaggttcagtcctgcttttacgccctcgagccgtttttcatcttcttttgtaatgatgacattccgtttttcgcgcgcgcagatcagtgcgccttcatgaaaccatccggcgcgcgcctcattggtgcccgcgatgatcattccttttgtatcggcaataatcacttcgcggctgtacatatgtttgacttcggcaatcaatttctttgccagttccggctgtaactgcatggcgatccccctcgccattattatacaaaaaaaaccgggtgtcccatcacccggttcatgtttattgcgcaggttttaatccgccttcaagtgttttgagcatttcatttttttctgagtccgacgcatgctgccaaagaacttcgaataagacgccgaggcccggaagcattttttcttcaccgctttggatggcgtcaacgatagtatgctccagctgatcctggttattgccggttacattggcaataacggcgttgcgtaaattaagatccattacaaccgctccttttttctgaatgtgatacgcatattcttaccgcgcacgcggtttattatgtgctgttcttaagatataataacaacatgcatgaaaaaaggagagcacagacataaagtgaaacgaatcgactctgcaaaaaaccaaaaagtgaaggactggaaaaaacttcacacaaaaaaagagagacttaaaacgaatacatttctgatagaaggagagcatctggcagaagaagcgctcaaatcaaagggaacggtaaaagaaattctcgtaaacgatgagagcgccatcccggccgatctggacatgagcattccgtgctacgtgctgagcgaagacgcgttttcagccgtgacggaaacagaaacgccgcagcggatcgccgcggtctgccatatgccggataagcagcctgatcagctgaagcggctgcttctgatcgatgccgtgcaggatccggggaatttaggaacaatgatcagaacggcagatgcggcggggatcgacgccgttgtccttggtgagggaacagcagacccgtacaatggaaaaacgctgcgttcagcacaaggttctcattttcatattcccattttgaaacgtccgcttgatgagtttaccgctgagctgaaatcacaaggcgtcgcgatctacggcacggcgcttgaaaacggtgcggcttatcaaagcgtgaagcctgaagaatcgttcgcgttaatcgtcgggaacgagggggcgggagtggacgccggccttctgcaaaaaacgcatctcaacctgtacgttccgctgtacggacaggcggaatcgctgaatgtggcggtggcggccgccatcctcgtttatcatctcagaggataggttgcgaaaagccttggatttcactataatagatagcaataatgtaaaaaccgtgacagaggacgtcaatttttgcacacactgccttccagggagaaaatgccgctgactgagagcatttttatcgcagcacagaaattgattttcacctctcgagttgtcaccgggaccgcgccaaacgcgcgtaaaggtgaaccggaacgatcgtttccgttatgtcaatgaagctgtcggcagatgaagtctgccttaaaaagggtggtaccgcggccacaactcgtcccttctctcaagggacgggtttttttgttttctgaaaaaggcatagaacggtttggtttacataaaaggaggatgcatgatggaagagaagcttaaacagcttgaactggaagctgcagaaaaagtagaagcggcgggttcattaaaagaagttaacgacattcgggtgcaatatctcggaaaaaaagggccgattacagaagttctccgcggcatgggcaaactgtccgccgaagagcgcccgaaaatgggagcgctcgccaatgaagtgagagagcgcattgcagcagccattacggcgaaaaatgaacagcttgaacaagaagaaatgaataaaaaactcagcagccagacgattgacgtcacattgccgggcagtcaggtaaacatcggcgggcgccatccgctgacggtcgttattgaagaaattgaagatttatttatcggcatgggatataccgtcgaagaaggccctgaagtggaaacggattattacaactttgaggcgctgaacctgccgaaggaacatccggcccgcgacatgcaggacagcttttacattacagaagaaatgctgatgagaacgcagacgtcaccggtgcagacgcgcacgatggaaaagcataaaggaaaaggccccgtcaaaatcatttgtcccggtaaagtgtatcgccgcgacaacgatgacgcgacacattcccatcaattcatgcagatcgagggtctcgtcgtcgaccgcaaaatcagcatgagcgatctgaaaggcacgcttgaattggtcgccaaaaaaatgttcggccaagatcgtgaaatcaggctccgtccgagctttttcccattcacagagccttctgtcgaggtggatgtgacctgctttaagtgcggcggacaaggctgctccgtctgcaaaaaaacaggctggatcgaaattctcggcgccggcatggttcatccgaacgtgctgaaaatggccggattcaatcctgaggaataccagggttttgctttcggaatgggtgttgaacgaatcgcgatgctgaaatacggcattgaagatatccgccatttctataccaatgatgtcagattcatttcgcagtttaaacaggcgtaagaggaggatacacatgtttgtttcttataaatggttagaagattacgttgacttgcagggaatcgacccggccgtgcttgcagaaaaaattacgagagccggtattgaagttgagggtatcgagtataaaggggagggcgtaaaaggcgttgtcatcggacacgtgcttgagcgcgaacagcacccgaatgccgacaagctcaacaaatgccttgttgatatcggtgcggaggaacccgtgcagattatctgcggcgccccgaatgttgataaaggacagaaggttgccgttgcaacggtcggagccgtgcttcccggcaatttcaaaattaaaaaagccaagctgcgcggcgaagcgtctcacggtatgatctgttcccttcaggagctcggcattgaaagcaagctcgtggcgaaagaatatgcggaaggcattttcgtttttccgaatgatgctgaaacgggagctgacgcaatggcggcccttcagcttgatgatgcgattttagaattgggcttaacgccgaaccgcgccgacgcgatgaacatgcttggcgtggcttatgaagttgcggctatcctcggcgcagaggtaaaacttccggaggcttcatatgaaaaagcggcagaaaaagcggcggatgctgtttccgttaaggttgaagatacgcaggccaatccgcattatgccgcaaaaatcattaaaaacgtcaaaatcggcccgtcaccgctttggatgcagacgaagctaatgaatgcaggcatccgcccgcataataacgtcgtggacattacaaacttcgtcctccttgagtacggacagccgcttcacgctttcgattacgaccggttcggttcaaaagaggtcgtcgtcagaaaagcggcggaaaacgaaaccatcgtgacgctggatgaacaagagcgcaagctgtcaagcagccatttggtcatcacaaacggaaaaaaagcgcaagccgttgcgggagtcatgggcggagctgagtctgaagtccgcgaagacaccactgcgattttactggaggccgcttatttcgacggacagaccgtccgcaaagcgtcgagagacctcggactgagaagcgaagcgagcgccagatatgaaaaaggcattgatccggcccgcgttttgctggcggctgaacgggcctgcagtctcattcaggcatatgccggcggagaagtgctctcaggcacggttgaagaaaaccatctgaaaatcgaagcaaacaacattcacgtgtctgttgaaaaagtgaacgccgtgctcggcatgacaatcgctaaagaagaaatcatcagcatttacaagcgcctcgggtttgcagtcggtgaagctgaagacgttctcgtcgtaacggtgccgtcgcgccgcggagatattagaatagaagaagacctgattgaagaagcggcgagattgtacgggtatgacaatattccgtccacgcttccggaaacggccggcacgacaggcggcttgacaccgtatcaggcaaaacgccggaaagtgagacgtttccttgaaggagcgggtctttcacaagcgaccacttattcattgacgaatgataaaaaagcggccgcttttgcgatcgaaaaatcattcaacacgatgcttgctctgccgatgagcgaagaaagaagcattctcagacacagcctcgtgccgaatcttcttgaagccgtttcatacaatctggccagacagactgattccgttgctttatatgaaacgggttctgtatttctgacgaaagaagaaaacacaaaaccggttgaaaaagaacgggttgccggagctgtaaccggattgtggcgcaaaaatttatggcagggtgagaaaaagccggttgatttcttcgtcgccaaaggaatcgttgaaggcctgctgcatcaattgaatgtgtcagaccgggttgaatttgtccagtcggaacgcaaaaacatgcatcccggccggacggcaaacattctattgaacggttcgcttgccggatttatcggccaggtgcatccggcaatggaaaaagagctggatatcaaagaaacgtatgtgttcgagcttgatctgcacgcgcttctgaccgaggaaacagaacctgtcgtgtatacgccgattccgaagtatccgtccgtcacgcgcgacattgcgcttgtggcagataaaaccgttacaagcggacagctcgaagccgtgatcaaagaagccggcggcgcgctgctgaaagaagtcaccgtatttgatgtgtacgaaggtgagcatatggaagagggcaaaaaatccgtcgccttctcgctccaatatgttaaccctgaacaaacattgacagaagaagaagtgacaaaagtacatgaaaacgtgctgaaagcgctggaagaaacgtatcaggccgtattaagaggataaagaaaaagcttgcagatcactctgcaagcttttttattatgaccgcttccgttcaacaaggcgtttcgctttttgcgtattggcaaaatgaagtttggtgaacgttctgagcgcaccttctcccttattgatgatcagcttggcggcagcttcatcgacgtgcggccccgcgccttttggaatcgtcatcccagcctctcgggaaagcttatccatttcaattaagaaagaatatcgcgcaatgatagaggctgcggcgacggaaagatgtatgctttccgctttcgtgctgaaaaacgttttttcttttacgatatcccgtccggaaagatgcttaaaataaatgccgggctctgcgaattggtcaatcagaatcgcttccggtttaacgccgttcatttttctcagcagattggaaatcgcctgattatgaaggagcgccttcatttttccttggctcatgcctttttcctgcatctgattgtatttttcgttttttaacacaagcaggctgtaaggaatggttttaattaacagtttggcgatttcaataatctgcggatcttttaaatccttcgaatccttcacaccgagttctttcattaaagagagctttgatttgtcggcgtaggcgcaggcaactgttatcggcccgaagtaatcgcctgttccgacttcatcagagccgatcactgacatggaggcaatgcccgccgggggagcgtagagcgggtcggccgcttttttgacggttttctttgccttcggcgcctcagccgttccccagcgggccgcttctgtgccggcgttttttccttgaaagagaaccttgcccgagcggtaggctgtaatggtacagcccggaggcttagcctggaagacggcgccctgcggaacggcgggagtaagggagccggcataggattgtttcatttgttccatagcggaagcggatacttttataacagaatgggacacgatataatctccttttttggcacttttcactgtatataccagtgtatcataacagcctgaggctcgtctttccattcaaacgataatcgtggtatgataggaactaggattctcgcggaatggaggagaaacgttgtctgacggcaaaaaaaccaaaacgacagtaaacatttacggccagcacttcaccattatcggggaagaaagcaaagcgcacatgcgccatgtggccggagtggttgatgataaaatgagagaaatcaacgagaaaaatccatatcttgatataaataagctcgctgtattgactgcggtcaatgtcgtgcatgattatatgaaactgcaagaaaaatatgaaatactggagcggcagcttaaagaaaaggaatgaacaccatatgatagatatcatcatcttagttttgctcttaatgggcacattgcttggattaaaaagaggatttatcctccaatttatatatttaacgagtttcatcctctcgattgcgtttgcggcgcttttttacaaaaacctggccccgcatctgagctttatacccgcgcctgatttttccggcgggcaggcggctctgtcttttattaaaggaaacgtagagacggcttattacaacgcgatcgcgtttgtcattttgtttatcatcgcaaagattctgcttcggattatcggagcggcgcttaatattatcgccagcattccggtcattaaacagatcaacaaactgctgggcggggtgctcggatttctggaagtctatttatttgcgtttatcctgttatacgtcgcatccgtactgccggtaagcgctcttcaggatatgctcgcacaatcgacgcttgcaaatatcatcacacatcatacgccgtatctgtcagggctcctgcaagaactgtgggcccagtacggggcataaaaaacttctcttgaccggagaagtttttttcaagctctgcgtcagttgtgccggaggagaaaaatttgtatgatgaaaagcaggaaacgactggggggttaacagtatgcataaaaaagatatcatcaggctgcttgaaacgattgcggtctacatggaactgaaaggggacaacccgtttaaaatatcagccttccgaaaagcggcagcggcgcttgagcaggatgaccgcagcctgtcggaaatcgacgacatgatgtctatatccggcatcggaaaaggcacttacggcgtcattcgtgaatatatggaggaaggtgtgtccggcacgcttctccaattgcagaaagaagttccggaaggcttggttcctcttttgaagcttccgggcctcggcggcaaaaaaatcgccaagctgtatcaggaactgggcgttcatgacgcggaatcgctgaaagaagcgtgcgagcagcaaaaagtacaggggctcgccggtttcggtaaaaaaacggaggagaaaatccttcaggctctcggagaagccggaaaacagccggaacgttttccgatcggctatgcgctcggcattgcttcagtaattgaagaacatttggcccggctgacggatattcagaaatattcccgggccggcagtctcagaagagcgcgggaaaccgtaaaagatctggattacattatcgctacagatcatccggaggctgtcagagaacagcttctttccctcccgaacgtaaaagacgtgatagcgagcggggatacaaaagtatcagtcatcctgacctttgaatatgagacgagtgtggatttccggcttgtgacagaggaacagtttgccaccacgctgcatcattttaccggttctaaagatcacaacattaaaatgcgccagctggcgaaagagcgcggtgaacggatcagtgaatatggagtagaaaccatagaaacgggagacgtcaaaacattcccgagcgaagaagcgttttacgcccacttcggcctgccgtttattcctcctgagctcagagaaaccgggcaggaggtcgacacgtaccgggaagaaacggatcttgtggagcataaagcgataaaaggcgatctccacatgcactcagcctggagtgacggcgctttttccatcagagaaatggcagaagcgtgtatggcaaaaggctatcagtacatggcgatcaccgaccattcccaatatttaaaggtagccaacgggttaacagccgaacggctcaaaaaacaggcggaagaaattgacgcgttaaatgctgaatttgaaaattttcatatttttaaaggcgtagaaatggacattctccccgacggttcgctcgattatgatgacagtgttctgtctgaaatggatcttgtcatcgcgtctattcattcaagcttcagccagccggagcatgtcattatgaaacggcttgaacaggcgctgacgaataagcacgtggacattatcgcccacccgacgggacgcctgatcggcagacgggccggctatgaagtcgacatcgacatgctgattgaactcgccgccaaaacaaatacggcgcttgaactgaatgcaaaccccgcgcgcctcgatttgcggactgagcatcttatcaaagcaaatgaaaaaggcgtgactttggtcattaataccgatgcccataatatcgagatgctcgatgatatgaaaacgggcgtgaccgctgcgcgcaaagggtggacggagacaaaacatgtgttaaacgcccggccgctacacgaggtcaaagcatttctgacgcgcaatgattaagtaaggaggatcacaaaaccgtgcagcaaaaagtgttatcatcacttgaatttcataaagtaaaagaacaaattaccgcacatgccgcctcatcgctcggccgggagaagcttctgcagctgaaacctttgacggatctctcagacatccaaaaacagctggatgaagtcgaagaagcatccgcggtcatgcgcttgagaggccatgctccgttcggcggcctgaccgacataagatctgctttacggcgggcggaaatcggcagtgtgctgacgccggcggaatttaccgaattgtccgggctgctgtatgccgttaaacaaatgaagcattttatcagccaaatgacagaagacggcgtcggcattccgctgatacaagcccatgcagaagagctgattacattaggcgatttggaaagggagattaactcctgcattgatgaccatggtgaagtgcttgatcatgcgtctcccgctttaaggggaatccgcacgcagctcaggacgcttgaatcaagagtcagagatcggcttgaatcgatgctgcgttcatcttccgcttctaaaatgctgtctgacaccatcgttacgattcggaatgaccgctttgtcatcccggtcaaacaggaatacagatcaagctacggcggaattgtccacgatacatcttcatccggtgcgacactgtttattgaaccgcaggcgatcgtagatatgaacaactcgcttcagcaggcgaaagtaaaagaaaaacaggaaatcgaacggattctccgaatgctgacggagcatacggctgaacacacacaagaaatcgctcaaaatgtggaagtgctgcagacactggatttcattttcgccaaagcgagatacgcaaaagcaatgaaggcgacaaaaccactcatgaacggagacggttttatccggctgaaaaaagcgcgccatccgctgctgccccaagatcaagtcgtggccaacgatattgaactgggcggagattactcaacgatcgttatcacgggaccgaatacgggcggtaaaaccgttacgttaaaaacactcgggctgctgacgataatggcgcaggcaggattgcacataccggctgatgagggatcggaagcagccgtatttgacaatgtgtttgccgatatcggcgatgaacagtcgatcgaacaaagtctgagtacgttctcatcccacatggtcaatatcgtcaatattttaaaagacgtgtctgaaaacagtcttgtgctgtttgatgaactcggtgccggaacagatccgcaggaaggagcggcgcttgccatgagcatccttgacgaagttcaccggacaaacgccagagtgcttgcgacaacccattatccggaactgaaagcatacggatataacagacaaggcgtcatgaatgccagcgttgaatttgacatcgaaacgcttgcgcctacttataagcttctgatcggagtgccgggccgaagcaatgcatttgaaatctcaagacgccttgggcttccggagcatatcatcggccaggcgaagtcagaaatgaccgccgaacataacgaagtcgatctgatgatcgcatcgcttgaaaaaagcaaaaaaagagcggatgaagaactttctgaaaccgaatcaatcagaaaagaagcagaaaaactgcacaaagagcttcagcagcaaatcattgagctgaacgcccaaaaagataaaatgatggaagaagccgaacagaaagctgcggaaaaactggaagccgccgcaaaagaagccgaacagatcatccgcgaactccggtccatcaagcaagaacacagatcctttaaggaacacgagctgattgacgccaaaaaacgtctcggagacgcgatgccggcttttgaaaaatcaaagcagccggaaagaaaaacagagaaaaaacgcgagctcaagccgggcgacgaagtaaaggtgctcacattcggacaaaaaggggcgctgcttgagaaaaccggcgagaaagaatggaacgtccaaatcggcatcctcaaaatgaaggtgaaggaaaaagatcttgagtttctcaaatcggctcctgaaccgaaaaaagaaaaagcaatcaccgccgtaaaagggaaggattatcacgtatcccttgaacttgacctcaggggagagcgttacgaaaacgccctcagccgcgtcgaaaaatatttagatgacgcggtgcttgccggctatccgagagtgtccatcattcacggaaaaggcacgggcgccctccgaaaaggggtgcaggatcttctgaaaaaccaccgcagtgtgaaaagctcgcggttcggggaagcgggagaaggaggatcaggcgtaacgattgtcgaactaaaataaaaagggagtaaacgtcatgaatgctttttgggaaaatgagcttgttgaaatcgcggcttattacagtgtagccgtcttgtgtctcgtcatttttctgaccgtgtttgaattggtgacatcctataaaaactgggtggaaatccaaaaaggcaatcttgcggtggcaatggcgaccggagggaaaattctcggtatcgcaaatgtctttcagcacagcatcgcccagcataattcgcttttgcaaatgatcggctggggcgtatacggatttattatgcttttaatcagctattttatctttgaatttctgacgccccggtttaaaattgataaagaaattgaaaaagataacagagctgtcggctttatttcatttgtcatctcagtcggcctgtcatttgtggtggccgccgggatttaaggggacggggaaaaatggagaagcttgcgaaagtgctgctgtcggcagcgggaatttttctgttcatcggacttatttatctggtcatgacatcttaatactgaaaaaaggctgccgaactagaatcggcggccttttttattgagaataccagtttatgcaggccgtatcagagcaaatgacggcttcccaactcatggcgcggatgacagacggcatgtcttgatcttccatgagaaagagtgtcataaaagaatcatatatgctcataaaagcggcgcgccgtttttcgtcggcaatgatcatgtcagcccgcagcaatccgcatacatccgaagccgccgtttgattgagtgaaaatatgcctttctcttcgacaggctcataataagtgcagcgctttatgccttttgaacggaacacatccaaaagtcccggaattaaaaatggtgaagtgacatcatcgctcggcaagtacagatcgggatgaagccgattaaacagcctggcggattctggatgtgcatattcatcccgaagtgccatgacagcgctcataagcgcaatccgcaaacggtcatgacggattgccaggaaacgggtctgcccatcgcgatgatctcctcatcactcggatacatatgttcataaggccgcttgcgcttttgctcttcccacccatcaggcatccggacaaagggatgaaacaaaaaggcggccgacgtaaacggcttcggcagctggcgcaggataggaactccctcttcaaaatgcagcgtttccaacaaactcaacaccttctgaaactcgaaatttcacatgaaacgctttccaattccaatcacccttctgctataataatagcgtataggaaaacagaagggagaggtattatgcagtctgaaaagccatggctttctcaatatcccgaagagattccgcatgagcttgaatttaccgatcaaaccctgccatccaatctgacaaactccgcagctcaattcccgaaccacaccgccatttattttctcggaaaaaaactcacattccaagacgttctcacagattcgttaaagctagccgcttttttacgcaaaacaggcctgaaaaaaggggacagagccgccattatgctgcccaattgtccgcagtcggtcatcgctttttacggcgtattgtttgccggcggcattgtcgttcagactaatcctctctacacggaacacgagcttgagtatcagctgaaagacagtgcgccgcgcgtgatcatcaccctcgatatgctgtttccgaaagtgataaaaatgaaaacgttatcactcgtcgaacgcattattacaacgagtataaaagactttttgccgtttccgaaaaatatgctgtatacgctcacacaaaaacagcaggttcatattgattatgacggatgcgaacaaattcacaaattagcggatattttaaaaaacgaaagagcggaggaagcagagccatttgatattgaccctgcgcatgacatcgccgtgcttcaatacacgggcggaacaaccggctatccgaaaggcgtcatgctcacacaccggaacattcaggccaatacagaaatgtgcgccgcctggatgtacaaaatgaaaaagggagccgaaaaggtgctcggcatcgtgcctttttttcatgtgtacggattgaccgccgtgctcaatttttccattatgcagggatgtgaaatgatccttcttcccaaattcaatcctttggataccttgaaaacaatcgacaggctaaagccgacggtttttcccggggcgccgacgatttacatcgggctgttgcatcacccggagctgaataaatatgatctgtcctccattgaaaactgtccgagcggttcagcggcgctgccggttgaggtcaaacagaaatttgaaaaagtgaccggaggaaagcttgtggaaggctacggattatccgaagcatcaccggttacccattcaaacttcatctggggaaaaaacaaacccggcagcatcggctgtccttggcccaataccgacgccggaatctattcagaagaaaaaggcgggcttgcggagccgtatgaacacggcgagctgatcgtaaaaggccctcaagtcatgaaagggtactggaataagcaggaggagacggcgcgtgtcatcagagacggctggctgtttaccggagatatgggatatatggatgaggaaggatttttctacatcgccgacaggaaaaaagacatcatcattgccggcggatacaacatttacccccgggaggtggaagaggcgctttatgagcatgaagccgttcaggaaatcgtcgtagcgggcgttcctgattcctacaggggggaaacggtgaaagcatttatcgttttgaaaaaaggcgccgaggcagatgccgatgagcttgatgcgtttgcaagagagcggcttgcgccgtacaaagtcccgaagctttacaaattcagaaaagagcttccgaaaacggccgtcggaaaaatattaagaaggcgtttagtcgaagaggaagatgcttcccgtgaaaacaaggtgccttaaaagaaaaacttgacaaaatccggattcctttttatcatgaagttatgaatgaatagtcattcatttatcgaaggaaggaacgatgacattgaaccaaaaacggccaaagtatatgcagattattgatgcagcagtagaagtcatagcggaaaacggctatcaccaatcacaggtgtccaaaatcgccaagcaggccggcgttgcggacggcaccatctatttatatttcaaaaacaaagaggatatactcatttctctttttaaagaaaagatgggccagttcattgaacgcatggaagaagaagtgaaagaaaaaacgacggcaaaagaaaaactcgctctcgttattaagcagcatttcacactgctcggcaatgaccgccaccttgcgattgtgacccagcttgagctcagacagtcgaatatcaagctgcgcctgaaaatcaatgatattttaaaaggttatttaaacatgctggacaccattttgaccgagggaatcaagtcgggggaatggaaagacaatctcgacgtccgccttgcccggcagatgatattcgggacgatagatgaaacagtgacaacatgggtgatgaacgatcagaaatatgatcttccggatttgtcagacaaggtattggagctgttggtgtcaggaattcatcaaaactaaagggggttgacggatgaacagcctttcgatggcggtagaacaatctgttgcggtgatcaccattaatcatcagccggccaacgcgctgtccggtgcggttttagatgagttgtccggtctgttcgacaggtgtgaaacggatgacagcgtcagaagcatcatcattcgcggtgagggaaaatttttctcggcgggcgccgatataaaggaatttacgtcgcttgaaaatcttgagcaatcttctgccatggcggataaaggccagcagctgatggaaagaattgaagggtttccgaagcccgttatcgcagcgattcacggcgctgcgctcggcggcggtcttgagctagccatggcctgccatatcagaatcgctacattggatgcaaagctcggcctgcccgagctgaatctcggcattatcccgggctttgccgggacgcagcggcttccccggtacgtcggtacggcgaaagcgcttgaaatgatcggcacttcagaacctgtgaccggagaagaagcgctcagcctcggccttgtcacgataggcgccgaacatgaggatgagctgctgcaaaaagcgaaaacgctcgcgggcaaatttgcggaaaaaagcccgcagtcgatggcttatctgcttgagctcctttattcaaacaagatctattcttatgacggcggcttaaagcttgaagcaaagcgctttggggaagcatttgcatcagatgacgcaaaagaaggcattcaggcatttctcgaaaaaagaaagcctcaattcggtgggcgaagataaaggggataagattatgaatctatttgtactgatgaaacggacgtttgacacagaagagaaaatcgtcattgaagcaggaaagattcaggaggacggggccgaatttatcatcaatccgtatgatgaatacgccattgaagaagccatacagctgaaggaagagcacggcggaaccgttaccgccgtaaccgtcggcggagaagatgcggagaaagaactgagaaccgcccttgcgatgggctgtgaccaggcggtgttaatcaatattgaagatgatctgagcgatcctgaccaatactccatttcaactatcttatatcattatttcaaggaccgggaatatgatctgattctcggcggaaatgtcgcgattgacggcggttcaggccaagtggctccaaggcttgccgaactgctgaacattccttgcgtcacaacgatcacaaaactgacaatcagcggcgatgaagctgtggcagagaaagacaatgaaggggataccgaaatcattaaaacctcacttcctttagccatcacggcacagcaaggcttaaacgagccgcgctatccgtcgcttccgggcattatgaaggcgaagaaaaaaccgctggaagaacttgagctcgatgatctcgacattgatgaagatgaagccgcaccgaagctcaaaacgatcgaacgttttctgccgccgcaaaaagaagcgggcagactgatcgaaggagaagccgctgatcaggcgaaagagcttgtgtcactgctgagaaaagaagccaaagtcgtataaaccgatattaaagaaactgggggatgtcagaatgggaaaaaaagtgatcgtactcggagaaattcgtgacggcgccttacggaacgtcacctttgaagccatagccgcaggcaaaaccatttccggcggaggagatgtcatcggcgtactgatgggaaaaggcgcggctgatgcagcaccagaactcattcagtacggcgccgataaagtatttacggccgatgcgccggggctttctcagtatacggcggacggatatgccgcggttctcggggatctgatcgaaaatgaaaagcctgatgcggtcattttcggccacacttctatgggaaaagatttgtcacctaagcttgcggcccggtttgaaacggggctgatctcagacagcacggatgtaagcgttaccggagacaacatcgtttttacaagaccgatttattcgggcaaagcctttgaacaggtgatttcaaccgatccgttcattttggcgacaattcggccgaataatattcaggcattagaaaaagacgcgaaccggacgggtgatattgaagagcttgcggcgcctccggcagatttgcggacggtcattgaagaagtagtcaaaaaaacggcggacggcgtggatttatcagaagcgaaaattatcgtagcaggcggccgcggtgtaaaaagcaaagatggatttgaaccgttaaaagaacttgccgaggtgctcggagcagcggtgggcgcttcacgcggcgcgtgtgacgcggactattgcgattattctcttcaaatcggccagacgggaaaagtcgtcacgccggatttgtatatcgcctgcggcatttccggagcgattcagcacttggcgggcatgtcaaacagtaaggtcatcgttgccattaacaaagacccggaagcggaaatatttaaaatagcggactacggaattgtcggcgatttgttcgaagtggttccgcttctgacacaggaatttaaaaatgccaatattcattcataatcaaaaccctctggctgatttgtcagagggttttgatttgtgttaattggttcgtacaaattaaatattaataaaacaatagattgacatgtacgaaccaatgtaataagcttttgtaaagcgcttacaaacttatccattcagcacacatcccagatacatagatcgtctctagtgctttcattcttattaaggggaaggaatgatcaagtttgtctcacaatacggcagtcattcaaactgatatcacacggggaaccattaataaaaacatatacggacatttcgcggaacatctgggaagaggcatatatgagggcatctgggtcggaaaagattccgatattccgaataccggcgggatcaggacggatgtcgccgacgccctcaaacagcttcagattcccgtcctcagatggccgggcggctgttttgcagatgaataccattgggcaaacggcgtagggaaacgcaaaaccatgctgaatacccattggggcggaacgattgattccaatgaattcggcacgcacgagtttatgatgctttgcgaactgctcggctgcgaaccatacatcgccggaaacgtcggcagcggaacggttaaagaaatggctgattggattgaatacatgacgtttgaagcgggcacgccgatgtccgactggagaaaagaaaacgggcgggaaaaaccgtggaagctgaaatatttcggaataggaaatgagaactggggctgcggcggaaacatgcatcctgagtattatgccgacctttacagaaactttcaaacctatgtccgcaattacagcggtaatgaaatctataaaattgccggcggcgcgaatgtcgacgattaccgctggactgaaactttaatgaaaaaagccgcggatctcatggacgggctgagcctgcattattacacaataccgggcgacttctggaaggggaaagggtcagcgacggagtttacggaagatgaatggttcatcacgatgaaaaaagcggcgcatatggatgaattgatcacaaggcacagtgccatcatggatcagtacgatcccgaaaaaagagtcgggctgatcattgatgaatggggcacgtggcttgatcctgagccgggcacgaatccgggctttctgtatcagcagaatacgatccgcgacgctcttgtcgcagccacgcattttcacatttttcatcagcacgcagaccgcgtacagatggccaatatcgcgcaaaccgtcaatgtgcttcaggcaatgatcctgacaaaagggaaagaaatgctgttgtcgccgacgtatcatgtgtttgatatgtttaaggtgcatcaggacgcatctcttttggcgacagaaacaaaagcagccgggtacgaatggaatgacggccggctcccgcaagtcagcatttcagcgtccaaacagcaaaacggagacatacatatcagcatttgcaatatcgatcatctgcacaaagctgatgtgaagattgaactgcggggcatgaaaaagacagggaagccttcgggaacgattctgcacgcggaaaaaatgaatgcccataatacattcagcagtccggaaaacgtcaaaccgaagacgttttccgggtttgctcaaaagggcggaaaacttgaggcggagcttcctccgatggcggttgtattaatcacgctgcctgcgggtccatcttaagttttgaacgcccgccgcccggctataatatactgtataaaaaagattatttccggcggtatcgggagaaaataatataagcattaaattagcatgaacgaatgggagatgctatactaaaaatcatcatttgacaattggaggaataacaaaatggctatcgtaaaagcaactgatcaatcgttctcagctgaaacaagtgaaggtgtcgtattggctgatttctgggctccttggtgcggaccttgtaaaatgatcgcgcccgttcttgaagagcttgatcaagaaatgggagacaaactgaaaatcgttaaaatcgacgtggatgaaaaccaagaaactgccggtaaatacggcgtcatgagcatcccgacacttctcgtattgaaagacggagaagtcgttgaaacatctgtcggtttcaaaccgaaagaagctcttgaagagcttgtaaacaaacatctgtaagccgaaagcttccgttacggcagggcgattcctttgaagggaatcgccttttttgatcttccaaaagctgagaatggagaaaaacaaatgttcgtgatacactgaatggacacgagaaatgaatgtaaggaagggtaacgtatgaataaacaactgaaagaaaagctggccctccttcccgatcagccgggctgttatttaatgaaagaccgtcaaaaaacagtcatctacgtggggaaagcgaaagtcttgaaaaacagggtgcggtcttatttcaccggttctcatgacgcaaaaacccaacggcttgtgacggagattgaggactttgaatatatcgtgacttcctccaatcttgaagcgcttattttggaaatgaatctgattaaaaaatacgatccgaaatacaatgtcatgctgaaagatgataaaacctatccctttattaaaatcacccatgaacgccatccgcggctgattgtcactcggaatgtcaaaaaagacaaaggacgctatttcggcccgtatccgaatgtgcaggcggcgcgggaaacgaaaaaactgctggaccgcctttacccgctcaggaaatgctcaaagcttccggaccgcgtctgtctctattatcatctcggacaatgcctcgccccatgtgtaaaggatatatctgaggagacaaaccgcgagattgttgaagacatcacccgttttttaaagggagggcataacgaaatcaaaaaagagctcaaagcgaaaatggcagaggcggcggaaaagcttgaatttgaacgggctaaagaattccgcgaccagcttgctcacatcgaatcgacgatggagaagcaaaaaatgaccatgaatgaccttctggaccgcgatgtgtttgcatatgcctacgataaaggctggatgtgcgtccaagtctttttcattcgccaaggaaaactgatcgaacgcgatgtcagcatgtttccgatgtatcaggaagcggacgaagagtttctgaccttcatcggccagttctattccaaaaacaatcactttctgcctaaggaaattctggtgcctgacagcgttgacagggacatgatcagcgagctgttggaaaccgccgtgcatcagccgaaaaaaggcccgaaaaaagagctgcttttgcttgcgcacaaaaatgcgaaaatcgctctgcgggaaaaattctcgttaatcgagcgggatgaggaacggtcaatcggtgcagccgaacggctcggcgaagcgctgaatatttacacgccgcatcggattgaagcgtttgacaactccaatattcaaggcacaaaccccgtatcggccatgattgtctttattgacggaaaaccgaataaaaaggaataccgcaaatataaaattaaaaccgtaacagggccggatgattacggttcaatgagggaagtcgtcagaagaaggtacacgagggtgctccgcgaaaaccttccgctgccggatttaatcatcattgacggcggaaaagggcagattaacgcggcgcgcgacgtgctcgagaatgagctcggccttgatgtcccggtagcgggattggcgaaagatgataaacaccgaacatccaaccttttgatcggcgacccgcttgaaccggtgtttttggagcggaacagccaagagttttacctgcttcagcgtattcaggacgaagttcaccgttttgcgatcagctttcacagacagatccgaggaaaaagcgtctttcaatccgttctggatgatatccccggaatcggcgaaaaacgcaaaaaaatgctcttaaaacatttcggatctgtcaaaaagatgaaggaagcaagccttgacgatatcaaaaaagcgggtgtgccggccgcggcggcccagctgctgtttgaaaaattaaaaaaatagtattgtgcttttctgaaaaatctgctagaatgtgaactaatttcataagatcgtgttatatggtgaagatagaggtgcgaacttcaatagtaagcctttggagaatgatggattctgcgaaaaaggctgaaaggggagcgtcgccgaagtgtatcacatcccatcggtgtgatttgctggccttgcattaaataaatgtaaggctgtcaagaattcattttcttggagggctatctcgttgttcataatcaatcgtaatgatatgaaaaagcaatgagagctattcctctcattgctttttttattgtggacaaaacgctcttttctcctcacccgcacgaaccaaaatgtaaagggtggtctagtatgggtcttatcgtacaaaaattcggaggcacttccgtcggctctgccgaaaaaattcaaaatgccgcaaatcgcgccattgctgaaaagcaaaaaggccatgatgtcgtagtcgtcgtttcggcaatgggaaaatcaaccgacgcgctcgttaacctcgcggctgaaatcacatctgaaccaagcagacgcgagatggatatgcttttgtctacgggagagcaggtcacgatttcgcttttggccatggcgcttcaggaaaaaggatatgacgccgtctcttatacgggctggcaggcgggtgtccgcacggaagccgttcacggtaatgcgagaattacggatattgatatcacggcgattcgttcgcagcttgcagaaggcaaaattacagtcgttgccggttttcagggcgtaacggaagacggcggcatcacgacgctcggacggggcggttccgatacgacggcggtcgctcttgccgcagcattggaagcggataaatgcgacatttatacagatgttccgggcgtatttacgacagatccgcggtatgtccggtcagcgagaaaactggcaggaatttcttatgatgaaatgctggagcttgcaaatctaggagcgggtgttcttcacccgcgggcggttgagttcgcgaaaaactaccaagtgcctttagaagtgcggtcaagcacagaacatgaagctggaacattaattgaggaggaatcatcaatggagcagaatttaatcgtcagaggaattgcatttgaagaccagatcacgagggtgtccgttacaggccttgcaagcggattgacaacactttcaacaatcttcaccgcgctggcaaaacgaaacatcaacgttgacattattattcagacacagtcggacgatggggaagcggatatttctttctcagtgaaaacggaagatgccgcgcaaacggtcgccgtgcttgaagaatataaaaacgcgcttgactatgaaaaaattgaaaccgaaagaaaactggcgaaagtctctattgtcgggtcgggcatggtttcaaatcccggcgtcgccgcggacatgtttgccgtactggcggaaaaaaatgtacaagtcaaaatggtaagcacatctgaaataaaagtatcagcggttgtcagcgaaaatgatatggtgaaagcggtcgaagcgcttcatgatgcgtttgagctttctaaacagccgtctgccgtataaacgggcaggcaaaaaggcgggacttggagtcaccgccttttttcaattatacagggtccttcatatcccattttacggtcaggacgactttatccgctctcttttttacctgttcataagattctgcaatctgatcgttcatcaattgaatctgttcggctataaaaccggcttcaagctgaaaacaaggctctttctgatgtttgagcctgctggatacgagcggtccttccagttcgaattccagttcttgtttttttgatcctgcgtttgtcaaagttccccagccggctttttcaaaaaaggcggggatttcttcccacgattgaagaggaaatttgcgggcgaggcgttttcccgcccaatacatcatggatgaatgctccgggccgaggatatccggaagcacgatttcccggattaattcgtagccgtatgcgctgacgtcgagttcagttaaaggttctaaagctgcttcataattattcttcatattatgtattcccctctctccttcgtttattatagcttaaacatgggggaggattacaggatgatcctataaaacacgcgaaaaaatgtgagaaagatatcgcaggaaaataaaattttccctccagataatcaattccgaaaattataatttatgtacacgttttcttgacgcccttttgagggaggagtaaaatgaaattgtcaataaattttaataaagtgcttacaattgaaacgaagtgggggcagagattttagtacatttcgcacttaaatcaaacagggggtaaagtaatgtctgggaacagagagttttattttcgaagattgcattccttgctcggtgttattccggtcggcatctttttgatccagcatttagtcgtcaaccaatttgccgcaaggggagcggatgcgtttaacaaggcggccggctttatggacagtctgccgttcaggtatgcgttagaaatttttattattttcttacctttaatttatcatgcggtttacggtgtgtacatagcatttactgcgaaaaacaacgctggccactacagttatttcagaaactggatgtttgtgcttcagcgtgtcactggtattctcacccttattttcgtcagctggcatgtgtggcagacgcggattgccgcgcagatgggcgctgaagtcaacttcgatatgatggcgaatattctgagctcgccgtttatgctcggtttttacattgtaggcgttttatcggtcattttccacttttcaaacggcttatggtcttttgcggtcacatgggggatcacggtcacgccgcgttctcaaagaatttcgacttacgtgacgctgattatatttttagcgctttcatacgtaggtttaaaagcgatttttgcgtttgtgtaagagaactagattactagagggagaggggctatcatgagtcaatcaagcattatcgtagtcggcgggggtcttgccggcctcatggcgacaattaaagcagcggaatcaggcacggccgttaaattgttttccatcgttccggtcaaacgctctcactcggtctgcgcgcagggcgggataaacggagctgtcaacacaaaaggggaaggagactctccgtttgagcattttgatgacacggtatacggaggcgactttttggcaaaccagcctcctgtaaaagcgatgtgtgaagcggcgccgtccattatccacttattggaccgcatgggggttatgtttaacagaacgccggaagggctcttggacttccgccgtttcgggggtacacagcatcacagaaccgcatacgcgggagcgacgacgggtcagcagctgctttacgcactggacgagcaggtgcgcagatatgaagtggcaggtctcgtcacaaaatacgaaggctgggaattcctcggcgccgttcttgacgatgagcgcacgtgccgcggtatcgtagcccaaaatctgaccaatatgcaaatcgagtcattccgttctgacgccgttattatggcgacgggaggacccggaatcgtattcggaaaatcaacaaacagcatgatcaacacgggatctgccgcatcaatcgtttatcagcagggcgcttattatgcaaacggcgaatttatccaaattcacccgacagcaatcccgggggacgataaactgcgtctgatgagtgaatcggcgcgcggcgagggcggaagagtctggacgtacaaagacggaaaaccttggtacttccttgaggaaaaatatccggcttacggaaacctcgtgccccgggatattgcgacacgtgaaatctttgacgtgtgcgtgaatcagaaactcggcatcaacggtgaaaacatggtgtatctcgatctgtcgcacaaagatccgaaagagcttgacgttaagcttggcggcattatcgaaatctatgaaaaattcatgggcgatgacccgcgcaagcttccgatgaaaattttccctgccgttcactattcaatgggcggactgtgggttgactatgatcagatgacaagcatccgcggactgttcgcagcgggtgaatgtgattattcaatgcacggaggaaaccgtttaggggcgaactctctgctttccgctatctacggtggaatggtggccggaccgaatgcggtgaaatatgtttccggacttgaaacatcagcggaagacctgtcttcttcattatttgattcctatgtgaaaaaagaagaagaaaaatgggccgatatcatgaagatggacggcgacgaaaatgcttacgtgcttcaccgtgagctcggagaatggatgacggccaacgtcacggtggtccgccacaacgacaagcttttgaaaacggatgacaaaatccaagagctgatggaacgctttaagaaaatcaatatcaacgatacgacaaaatggagcaaccaaggggcgatgttcacccgccagttctccaatatgcttcagcttgccagagtcatcacgctcggcgcatataaccgaaatgaaagtcggggagcgcactataaaccggatttccctgaaagaaatgacgatgagtggctcaaaacgacgatggctaaacatgccggtccgtttgaagctccggaatttgaatatcaggatgtcgatgtatcactgattgcgccccgtaaacgcgactactcgaagaagaaggtggcgaaataatcatgagtgagaaaaagatacggtttatcattacacgtcaggatacgcccgaaagcgcgccatacgatgaagaattcgaaatcaattaccgcccgaatctgaacgtgatttccgccctgatggaaatccgcagaaaccccgtgaatgcaaaaggagagaaaaccactccggtcgcatgggacatgaactgtcttgaagaagtatgcggcgcctgctccatggtcatcaacggaagacctcgccagtcatgcacggcgctgattgataagctggaacagccgatccgtctgaagccgatgaaaacattcccggttgtccgtgaccttcaggttgaccgcagcagaatgtttgattcactgaaaaaagtgaaagcatgggtgccgattgacggaacttacgatttggggccggggccgagaatgccggaaaaacgccgccagtgggcatatgaattgtctaaatgcatgacatgcggcgtctgcctcgaagcctgcccgaacgtcaacagcaagtcgaaattcatggggcctgccccgatgtcacaagtgcgtctgtttaacgcccatccgacgggcgcgatgaacaaagcagaacgtttagaagcgttaatgacagacggcggcctcggagattgcgggaattcacaaaactgtgttcaatcctgcccgaaaggcattccgcttacgacttcaatcgctgctttgaacagagataccaatttacaagcattccgtaatttcttcggaagcgacagagtataagaaagagaaaaagagcctcttccgcacgggagaggtttttttataaggagctgaaggtgatgaaacaaccgcaatatattgatatcccgtttgaagaatggagacagtcgttttctttctttactgaagtatcggtccgtttttcagaaacggatatgttcggccatatgaataatgtaacccctttcatctattttgaagaagcccggatcgcttattttaaacagcgaggcatgacggcgcaaaactcggaaacgatgaccgtcgtcgcaagccagcagtgcgactatatgcgtcaggtgatgccgtatgaaaatctgcggatttatgtgaaagcaagcgctgccggaaatgcgtccgtcacccttcattaccttggagaaaatgagtcgggcctcccgtgctttacaggttccgtcgttatggttcaagtgtcgaaggaaagcggcaaagcggtcagctggacggagcgggagaaaggcattctgctcgcctgaacggataactatttctctaagagacgtcacctccgaagcgtcctttacatatgatatcttgactatataaacccattcgtttcagattcgctctcaccttagcaaggagggttacaatacttgaaggagaaagattttcaatcaaagccgctgctgaccaaaagagaaagagaagtattcgaattgctcgttcaagacaagacaacaaaggaaattgcaagcgagctatttatcagtgaaaaaactgtacggaatcacatttcaaatgccatgcagaagttaggtgtgaaagggcgttcgcaagctgttgtcgagcttcttagaatgggtgagctagagctctgattcttgccggttttccttcttttcgagaaggagccggttatttgcgttggcgcccgggctgatgggcatgcggtgaaaatcccgtttttcctttttctccgtcagtcttgcattttcttaaaaaaagaaggaaaatagacacggagcgcatagcccagaaagatccttgagtgagggatggacaaatgacatcaaaatctgtagagcatgttgcggatatcgaaaaatcactccgccatatcgctgcgatcattaaacaaaaaggaagagaaatccttaaccaatatgcaattacaccgccgcaattcgtggggcttcaatggctttatgaattgggggatatgacaataggcgaattatcaggcaaaatgtatttggcttgcagcacgacgacggatctgatagaccgcatggaaaaaaataagcttgtcgagcgggtcaaagacccggctgacagacgggtcgtcagaattcatcttctcgctgaaggagagcgcattatccaagaagtgattttgaaaagacaggcttatttgcgggatatgtttgcgacattttccgaagaagaaacagccgctttcgaaaaatcattattgaaactgcagcatgaaatgaaaagaaaatgaggcgattttgttggaacagccgataggagtcattgattccggggttggcgggttaaccgttgctaaggaaattatgagacagctaccgaaggaaaatatcatctatgtgggagatacaaaacgctgcccgtacggcccgcgtcctgaagaagaagttcttcaatacacgtgggaaatgaccgattacctgctggaaaaccaccatatcaaaatgctcgtgatcgcctgcaatacggccacggccattgccttggaggatattcagcgcaaaacggatattccggttgtcggcgtcattcagccgggtgcgagaacggcgataaaggtcacgaaaaaccagcatatcggcgtcatcggcacggtcaataccattaaaagcagagcgtatgagcaggcgctgctcggattaaacgcagaacttcaagttgagaacacggcttgtccgctgctcgtaccgtttgtggaaagcggacggtttcttcaggaatcagcggaggaagcggttgaagcatcgcttgagcctttaaaaggtacatcaattgacaccttgattttaggatgtacgcattatccgattttaaaagatccgattcagaactatatgggagagcatgtgaaaatcatttcctccggagacgagacggcgagagaagtgagcaccatcttgtcttataaaggtttgttaaaccaatcgaaacatgcaccggagcatcaatttcttacaacgggagagcggaacggcttcgcaaaaattgccgaagactggttcggccacgaaatcggccatgtcgagtgcatctcccttcaagagccggtcagaaaataaatcaaaaaacccgctgtttacggcgggtttttttacgcttcccggtctatttcccggacagggctcgtatacatcatagtacaaacagccttaggagggaaaagtatgctgaaaaaaggacctgcagtcattgctgcaacatgtcttacttcggcttttgtgttatctggatgcggtttgtttcaatccgataaaacagccggggaaattgacccgcctcaagacatttcatatgtaaaggatgaagcgggaattcaggcaaaaccaaagcagtcagagaaaaacggcacttctaaagccgaccagccggccaatacagtcatgcgagagctgtatctgattgataaaaacggctatgtcgcagcacagacactgcctcttccgaacagtgagggaaccgcaaagcaggcccttgagtatttggttcagggagggcctgtgtcagaaatcctgccgaacggcttcagagcggtgcttcctgttgatacgacggtaaatgtcgatattaaaaaagacggcactgccgtcgctgatttttcgaaggaatttaaaaactataaaaaagaagacgaacaaaaaatcctgcaatcgattacatggacgcttacccaattcagctcaatagataaagtcaaaatcagaatcaacgggcacgagctgaaagaaatgccggtgggcggcacgccgattacgggcgacttaagcagaaaagacgggattaatattgaaacggccggagtgaatgatctgacagacacccacccgctgactgtatattatctggcggaaacagagacgagcgaatactacgtgcctgtcacaaagcggattgacaattcggaaacaaatgacatcaccgctgccgttgaacggctcgccgacggaccgggcaaagcaagcgggcttttgacggactttaataacgatgttaaacttctcagcaagccgaaagtgaaagacggccaggttacactggactttaacagctccatttacggaagcgccgacgaaaaaacaaaaatggtatcatcgggcgtactggacagcatcgtcctcacgttaaccgaacagccgtcgatcaaaagtgtttctataaaagtaaacggaaaatcagaactggtgaatgaaaaaggagaatccctttcaaaacctgtttcgaggccgtcacaagtgaatacgggtagtttttaatttgcgatttttgatatactagtaaaaaagaggttagcgttccggctgcctctttctttattcacaatccggaacaaaaggtttatgtacatataatcggaggtaaaatatgagacacgacggaagacagcacgatgagctgcgccctatcacatttgatttggattttatcactcacccggaaggctctgttttaattacagcgggaaatacgaaggtcatctgtaatgcatctgtggaagaccgggtgccgccatttttacgcggcggaggaaaaggctggatcaccgcggaatacagcatgcttccccgcgcgacgaatcaaagaacgataagagaatcttcaaaaggaaaggtctccggcagaacgatggaaattcagcggctgatcgggcgcgcgctccgggccgtcgttgatttggagaagctcggcgaacggacgatctggatcgactgtgacgtcattcaagctgacggcggaacaagaacggcttccattacgggcgccttcttggcaatggccattgcgatcggcaaactcgtaaaaagcggcgttatcaaaacctctcctgtgacagattatctcgcggccatttctgtcgggatggataaagaagaaggccttcttttggatctgaattatgaagaggattcggcagctgaagtcgacatgaatattatcatgacgggaagcggacgttttgtagagcttcaagggacgggcgaagaagccacattctcccgtgaagatttaaacggactgttaagtcttgccgaaaaaggaatccagacgcttattcaaaagcaaaaagaagtgctgggagaaatattgcctgaactgaaataagaaagagaggcctgatcaccgtgaaagaagccattattgcgacacataatcagggaaaagtgaaagaattcaaggaaatactcgaaccgaaaggctacagcgtctcttctttggcggaaatcggatttacggaagaaattgaagaaaccggacatacctttgaagaaaacgccatcttaaaagcggaagccgtggcaaaagccgtaaacaaaatggtcattgcagacgactccggtttatcggtggacaaccttggaggcagaccgggcgtttattcagcccgttatgccggagaagcaaaagatgataaggcgaatatggacaaggtgctgtcagaattaaaaggcatcgaaaaagagcagcgcacggcccgtttccgctgcgcccttgccgtcagcatgccggggcaggaaacaaaaacggtcgaaggtcatgttgaagggtatattgcggaaggacccgagggggataacgggttcggctatgaccccatttttattgtgaaagataaagataaaaccatggcccagctgacaagcgctgagaaaaacaaaatcagccacagggctgaggcgctcaagaaactgtcaaagctgcttgattcataagggggagcgtatgcaatgaaagtgctgataataagtgacagtcacggccttgaagacgagctggagacgattgcaaagcggcacgaagacgaagcggatctgatgattcattgcggtgattcagagcttgacgccgcacatccggcgcttacgccatatcacacggtaaaaggcaattgcgactttggcggcgggtttcaggatgaactccttctggacgccggttcaaagaaaattctggccgttcatgggcatcttcacggcattaaacagtcacttttaactgttttttaccgggcggaagagcttggggcggatatcgtctgcttcggccattcacatattgccgggagtgaagtgctccggggcaagcttttgattaatccgggcagcatccatcttccgagagtccgcaatgtgaaaagctatgccattcttactcttacagaaagagaaggcgccgtgacattttacgacgaaacgggtcgggaattgaaggacttggggaatacaatcagtttttaacaagtgatgggggagatttcattcttccccatcaaaagtttttaaaaaaatattgacttatgatttgaacctgtatataataaatcttgtcgctgatacataaagcaaaagctgtcccagtagctcagctggatagagcaacggccttctaagccgtcggtcgggagttcgaatctctcctgggacgtacaaaaaaagagctggtgacatcagagtgaaaactgatgccgctggccttttttatcggatgactatattgtcaattcgctgatatcatggtaaaatgatcagcagaacaatttgattttcatgtcccagtagctcagccggatagagcaacggccttctaagccgtcggtcgggagttcgaatctctcctgggacgtataaaaaaacctcaagccctgacaatgggtttgaggtttttttgtattttattttttattttacgaaacaaaagttccgtatttgatgaaaattgtaaagtaattttaatataaatgaaacttaatgtaatatttaccgtgataaatatatgtataaagatacttaaggcgcccttgagtaataaattatctaatttctatcatgcattttgtcaataatcgatagaaagacagcgggaggaattagcttttgaagtacgcatttgcatataaaaatcacaatatagaaacgatcttttgcggaaaagacaagctgtttgaggaactgaagcaatttttaatcactcaatgcggtttaatcattgttgaggtttcaagggctgattactatacggagcaggaaatgaatcaatggaatgaccgttatactttgtgaatatgaaaagaaaccggccgtgtgagaccggtttttgtatcatctgaatccgctcggagcactgaagcttcctgcatggccgctgaaaccgcctccgagcgcgccgggatgtgccccggcgccgaggcttccgccgacgtcactgaaggtttggccgtagtacccggatgtataagggtacggaacgaattgctgtccggcgaatgacagcgtgctttgcggggtctgctgtccgtatccagatgacgggaatccctgctgaaaagaagggccgccttgatatggagctgtatgcatcggggccgggggataataagactgcggcggtaagaccggtaaaggcggaaatccaggaggcaggccctgcatgcctgataacatcttattcatgacatcactcatttcttacgagataagaacagtgtatgcgtatgtctgtataaagagcctgttcaatcgaacggaatatctgacaagcatgccggaaggacagagaaaaatcgtgtaataaaatgtgacatattcgtatatgaacggaaaaatttcatgtaatcttgagagattaataaaaaaatgataaaaacttttaatatttacagatccctttgtaccagtaatgaaagcgtatacaaagtagattgattaatctaaattgtctaataattataaaaatgctgttgacactgcctgcaaacgggcgtaatatgagttcaaacaaaaataaataaatgattcacgctaaaaagaaaaatcataaaacactgaaaaaacaaacaaatgaaggttcttttttaataaaagagctgccataataaaaagcgcagaagaggataagtagctttgctgaagtttttcacagagagccggtaacgctgagagccggtaaaacaaatcaaagtgaactcccctcagagtgccggtctgaaatgtaaagagtaggactcggccgagtgaacgcaatgtttactcgttatcaaaacggataatcattatccatgagacggtctgcatatgaccgtaaacaagggtggtaccgcggagagcaaagccttttcgccccttttggctatcgcatgaaatgcttggctgaatgtgggtgggaaggcttttttatttgcgtcagccggcgctgcgttttatgaattggattttagaagggaacattgaaaaggaggaactgaaaatgggcacaaatgtacaggcggattctttgtctgccgaatgtacaaaaacaatgaacggggctctgatgctgattgaatcattaaagaaagaaaatgtcgagatgatcttcggctatccggggggagccgtccttccgatttacgataaactgtatcaatcaggattggttcacatcctgccccgccacgagcaaggcgcgattcatgcggcagaagggtatgcgagagtctccggaaagccgggggttgtgattgctacttcagggcccggcgcgacaaatttagttaccggtcttgcggatgcgatgattgattcactgccgctcgtagtatttaccgggcaggtggccacttcggtcatcggcagcgacgctttccaggaagccgacattttaggaattacgatgccgattacgaaacacagctaccaagtccgccgtccggaagatctcccccgtgtgattaaagaggcgttccatatcgccacgacgggaagacctggtccggtattaattgatataccgaaggatgtcgcagcatttgaaggagagttcagatatgatcatgagatcagccttccgggttatcagccggtaaaagagcctaactatctgcagatccgaaagctcgtggaagctgtaagcagtgcgaaaaagccggttattttagccggagcgggtgttttgcacggtaaagcttcagaagatttaaaaaattatgtcgaacagcagcaaataccggtagcgcacacgctcctcggtctgggcggtttcccggcagaccatcctctatttctgggaatggcggggatgcacggcacatacacagcgaatatggcgctttaccactgtgacttgttgatcagcatcggagcgcggttcgatgatcgtgtgaccggaaatctgcagcattttgcaaaatcggccaaagtagcgcatatcgatattgatcctgctgaaatcggaaaaattattgaaacgcagattccggtggtcggcgacagtaaaatcgtccttcaggaattattgaagcaaaacggaaaacagggacagacagaggaatggaaacagcagctttcagaatggaaagaagaatatccgctttggtatacagacaacagagaagagggcttgaaaccccaaaagctgattgagtatattcaccaattcacaaacggagaggcgattgtggcgacggatgtcggccagcaccagatgtgggcggctcagttttatcctttccgaaaggctgataagtgggtgacctcggggggactcggcacaatgggcttcggccttccggcggctatcggagcacagctggctgaccgtaacgccacggtcgttgccatcctcggagacggcggttttcagatgacccttcaggaattagatgtcatccggcagctgaatcttcctgtcaaagtggttatcttgaacaacgaatgtctgggcatggtcagacagtggcaggaaatcttctatgaagaacgctattctgaatccaaattctcggcgcagcctgactttgtcaaattgtcagaagcctacggcattaaaggcgtccggatttcatcggaagaagaggcggaagaagagcttaaaaaggcgctttcatcaaaagaaccggtcgttattgacgtccgggtcgccaaaagcgagaaagtattcccgatgattgcgccgggtaaaggacttcatgaaatggtgggggtgaaaccttgaaacgcattatcacattaacggtggtcaatcgctcgggagtattaaaccggatcaccggcctgtttacaaaaagacactataatatcgaaagcatcactgtaggccacacggaaacaagcggtgtttcaaggattacatttgtcgtccatgtggaaggcgaaaatgacgtagagcagctgacaaagcagcttaacaaacaaattgacgtccttaaagtgacggatattacaaaccaatcgattgtacagcgtgagcttgcactgattaaagttgtttccgcaccgtcggccagaacggaaatcaatggaatcattgagccgttcagagcttccgtcgttgatgtctcaagagacagcatcgtcgttcaggttaccggcgaatctaataaaatcgaagcccttatagagcttctcaaaccttacggcattaaagaaatcgcgagaacgggcacaacggcttttgcgaggggaacccagcagaaggcgtcatccaataaaacaatttcaattgtataacacaaaaaagggagagattaaaatggtaaaagtatattataacggtgatatcaaagagaacgtattggcgggtaaaaaagtagcgattatcggttacggttcacaaggtcatgcacacgcgctgaacttaaaagaaagcggaattgatgtcattgtcggcgtcagacaaggaaaatcatttacacaggcccaagaagacggtcataaagtcttttcggtaagagaagcggctgcccaggctgatatcattatggttcttcttccggatgaacagcagcaaaaagtatatgaagctgaaatcaaagatgaattgacggctggcaagtcattggtattcgcacacggatttaacgtccatttccatcagatcgtgcctccagctgatgtagatgtcttccttgtcgctcctaaaggaccgggacaccttgtcagaagaacatatgaacaaggcgcaggcgtaccggcattgtttgccatctaccaggatgtatcaggagaagcgaaagatacggctcttgcttatgcaaaaggaatcggcggagcgcgtgcgggcgttcttgaaacaacatttaaggaagaaacggaaacggatttgttcggtgagcaggctgttctgtgcggaggtttaacggcgcttgtcaaagcgggttttgaaacgctgacagaagccggctaccagcccgaactcgcatacttcgagtgtctgcacgaactgaagctgatcgtagacttgatgtatgaagaaggcttggcgggcatgagatactctatctccgatacggctcaatggggagattttgtatcaggaccgcgtgtagtcgatgcgaaggtaaaagaatcgatgaaacaagtattaacagatattcaaaacggtacattcgcaaaagaatggatcgtggaaaaccaagtgaaccgtcctcgtttcaatgcgatcaatgcaagtgaaaacgagcatcagattgaaaaggtcggcagacagcttcgtgaaatgatgccgtttgtcaaacaaggcaaaaagaaggaagcggtggtctccgttgcgcaaaattaatgttttcgacacgacccttcgtgacggtgaacaatcccccggggtcaacctcaattcccgggagaaactggcgatagccaagcagcttgaaagactcggggtggacattattgaagcgggatttcccgcttcatcccgaggtgattttttagccgtgcaggaaatcgcaagaacaattaaaaattgttcggtaacagggcttgcccgatctgtcaaaggtgacatcgacgcagcctgggaagcgctgaaagacggggccagcccgcggattcacatctttatcgccacctctgacattcatctgaagcataagctgaaaatgacgcgggaagaggttaaggaaaaagcggttgaaatggtgaagtatgcaaaagaacgctttccgatcgttcaatggtcagcagaagacgcatgccgcacagaacttccgtttctggctgaaatcgtagaaaaagtgattgatgccggcgcgagcgtcatcaacctgccggacactgtaggttacctgacgccggctgaatacggaaacatctttaaatatatgaaggaacacgttccgaatatcagccgggtaaagctctcagcccattgccacgatgatctcggaatggcggttgccaactcactttcggcaattgagaacggcgctgatcaaattgaatgcgccattaacggcataggagaaagagccgggaacgccgcgctagaggaaatcgccgttgcgcttcatgtcagaaatgacgcgcatcaagccgattcatctctcaatcttcatgaattgaagcggacgagtgatcttgtcagcaaactgacgggaatggccgttccccgcaacaaagcaatcgtcggagataacgctttcgcacatgagtccggcattcaccaagacggtttcctgaaagaaaaatcaacatatgaaatcatttcaccggaacttgtcggcgtgactgctgatgcgctcgtactcggaaagcattccgggcgccacgcgttcaaagaccgcctgaatacgcttggattccagtttgatagtgatgaaatcaataaatattttacgatgtttaaagaactgaccgaaaagaaaaaagaaatcaccgatgatgacttgatttctcttattttagaagaaaaagtgacggacaaaaaaatcggctatgaatttttgtctctgcaagtgcattacgggacgtctcaggtgccgactgcaacagtctctttaaaaaatcaggaaaacgaacagctgatgcaagaggcggcaacgggggcgggcagcgtagaagccgtttataatacgctcgggcgctgcatcgataaaaatattgaactgacagactaccgcatccaatccaaccgaaaaggcgaagacgcgctggctcaagtttacgtcagagtgaccgtgaacggaaaagaatcatcagggcggggaatcgcgcaggatgttctggaagcttctgcaaaagcttatctgaacgctgtgaaccggcaattggtgctggattgcaatatagacggattaaagagacagactgcggtcggctcgtaatagaaaggagaacgtttgatttgaaaaaacgcattgctttgcttcccggtgacggaatcggaccggaagtggcggaatcagcggcagatgtattgaaaagcgttgccgaacaattcggacatgaatttgaatttgaaaacggactgatcgggggagcggccattgacgcccatcaaaacccccttcctgaggagacggtggctctttgtgaaagatccgacgccatcctgctcggggcagtcggcggaccgaaatgggaccaaaatcctccggagctcagaccggaaaaaggcctgctcggcatcagaaaaaaactcggcctgtttgccaatctgcgtcccgtgaccgtatttgaaagcttgtctgaggcatctccgctgaaaaaagaatatatcagcggcgtcgactttgtaatcgtcagggaactgacgggcggcctctacttcggagaaccgagcagacagtatgtcaatgaagcgggagaaaaggaagcggtcgatacccttttttataagaaagaagaaatcgcacgtgttgtcagagaagcttttaagatggctgccggcagaaaaggaaaagtgacgtccgttgataaggcgaatgtgctttcttcaagcaggctgtggcgtgaaacagcggatgaaatcgcaaaagaatttcctgatgtgacgcttgaacatatgcttgtcgataatgccgcgatgcagctcatctacgctccgagccaatttgacgtcatcgtaactgagaatatgttcggcgatattttaagcgatgaagcctccatgctgacaggctcgctcggcatgctgccgtcagccagtttatcaagttcaggtcttcacttgtttgaacccgtgcatggatctgcgcctgacatcgccggtaaagggatggccaatccgtttgcggcgattttatcagcggcgatgcttttgagaacatctttcgggcttgaaaacgaagctcaggcggtggaaaaggcggtcgcaaaggtgcttgcagacggcagccgtacacgtgatatcgcccgggacggccaatatgccggaacgcatgacattactgaaaaagtaaaagccgcattagccggctcgaatacaaaatctatagtgtgacgctttaaagaaagcggtcttagttcataggtagagggaggaaacaaagatgatgcctcgaacaatcatcgaaaagatttgggatcggcatgttgtaaaaagcggtgaaggaaaacccgaccttctctatattgatctgcatctaattcatgaggtgacgtctcctcaggcgtttgaagggttaaggcagaagggaagaaaggtcagacggccgcagaacacattcgcgacgatggaccacaatattccgaccgtcaaccgttttgacattaaagatgaagtcgcaaagcgccaagtaaccgcgcttgaacggaattgcgaggagttcggcgtccgtcttgcggatcttcacagcgcagaccaggggatcgttcacgtagtcggacctgagcttggtctgacactaccggggaaaacgatcgtttgcggagacagccatacatcgactcacggcgcgttcggagcgcttgccttcggtatcggcacaagtgaggtggaacatgttctttccacacagacattatggcagcagcggccgaaaacgcttgaaatccgcgttgacggaacgctccaaaaaggagtgaccgcgaaggatgtcatcttgtcggtcatcggaaaatacggggtgagattcggtaccggatatgttattgaatacaccggggaagtattcagaaacatgtctatggacgaacgcatgaccgtctgcaatatgtcaatagaagcgggagcacgggcgggactgatcgctcctgatgacacgacgattgaatactgtaaaaaccgtaaatacgcgccaaaaggcgaagagtttgacaaagccgccgcagaatggaaagcgttaaaaaccgatccgggcgccgtatacgatcattccatcgtgttagacggcagcgagatttctccaatggtaacatggggcgtcaatcccggcatggttctcccggtcgatgcccaaataccggcgccggaaacgattgattctgaagacggtaaaaaagaagccatccgcgcgtacgaatacatgggaatctcaccgaatcaaaaaattgaagatattaaagtcgagcatgtgtttatcggctcctgtacaaattcgcggatgaccgatcttcgccaggctgcggatatgatcaaaggccgaaaagtcgccgacagcgtcagagccattgtagtgccgggttctcaaagcgtgaaacagcaggccgaagaagaagggctgcaccgcgtgtttctcgaggccggatttgaatggagagaatcaggctgcagcatgtgcctcagtatgaacaatgatgtcgtgcctgaaggggaacgatgcgcttccacttccaaccgcaacttcgaaggcagacagggaaaaggcgcgagaacacaccttgtcagtccggcgatggcggcaatggcagccattcacgggcatttcgtcgatgtaagaaagttttatcaagaaaaaacagttgtgtaaggagtgcgcaaaaagatggaacctttaaaaacgcatacgggaaaagcggctgtcttaaaccggatcaacgtcgatacggaccagattattccgaaacagtttttgaaaagaattgaaagaacaggatacggcagattcgcgttttttgattggagataccttgagaacggtgagcctgatcctgaatttgaattaaaccgcaaagtctatgaaggcacgtccatattaattgccggagagaatttcggctgcggatcatcccgtgagcacgctccttgggcgctggatgattacggcttcaaaatcatcattgctccgtcatttgccgatatttttcatcaaaactgttttaaaaacggtatgcttcccatccgtatgccgtatgatcagtggaaaaaactcgccggtcaatatgaaaatcagtctcttaacatgacggttgatttggaaaaccagctcattcacgacagtgaaggaaaagagatttcatttgaagtcgatcctcactggaaggaaatgctgatcaacggttatgatgaaatttcattaacgcttctgctggaggacgacattcagcagtttgaatcgaaaagaagttcttggcttcaagcctgaaaaaagccgaccggcatctgtccggcggctttttttaccgtgcgcgccatcctttcttgtgtttcctgacgcgtgttgatacacttgaaaaaaatagcgcctgaaaggaaataaagtatgacgcatgacaagaaaaaagctgatatcattcctttcccccgtctgaaagaacgcttggttgataaagggatggccgccatgaaggataaacagtatcaggaggccctcgaactgttctcagaggcggtaagccacggcgataccgagtccgacgtacatttaggcatggcgatttgttttctggaactcggggaattggaagaagcaaaacaagtttgcgagaaaatgctgaatgaagggtacggccattatttcaccgtactgcaggtgtacatgaccattttaattcagctgaaacaatatgaagaagtcaaaagcacgattgaagctgtgctggaagaaaaccagctgcccgcagaaagtgcggagcaattctaccggctgctcgaattcagccgcaaaatgaccgatcccgaccagcaggatgaagcgtgggaggaggaatacgaggacattcttgatgcggaaaaagtgctgaacagccccgctgaacaaatgaatctgattcattctctcaaagaccgcaatattgcaaaatacacgggtctcttaaaaacgattcttcaagatccgggcgcacatccgcttatcaagacgatgattttgacgctgatggcggagcatgactacagcaagccggttcatattacaaaattcggcgattcaatgaccgcggttccgagtgaaacggttcagcctgatgcggctccggttttgcatcgcgttctacgggtgcttgatgaaacgctcggcaatgaaaaccctacattatacgctgccgtcgaggagctgtggagaaggcatctgtacgtcctgcacccttttatgccgaagtttttgaacgcagatttatgggcggcggcgcttcataaggtcggttacgagatgcacggtattgacattgagccggaggaacttcatatgatgtacgagtttgacagccgcgaacttgaagaagcctgcacgatgattaaggatattgaagaaatttcttatttgtaaatcacaccatatagttgaaagcggtaggcgttatgttataatatagtggttgtatttatgtatagcggtttaactgaaatgagaattacggttggacaggctgccagttcattacataatgattctgattcaaagcggttttttctttgacaaagccgcggattgctttagaatggaagaccgacacaacctgaatagatttttggagggaaacacatgtctgtaaaatgggaaaaacaagaaggcaacgaaggcgtattaacggttgaagttgatgcggatacgttcaaaacagctcttgatgatgcatttaaaaaagtagtaaaacaggtttctattcctggattccgtaaagggaaagttccccgcggtttattcgaacagcgtttcggcgttgaagctctttaccaggatgctttagatattttacttcctgtagaataccctaaagcggttgaagaagccggcattgaacctgtagaccgccctgaaatcgatgttgaaaaaatcgaaaaaggcgaaagcttgattttcactgcaaaagtgactgtaaaaccggaagtgaaacttggcgactacaaaggcttaggaatcgaaaaagatgacactgccgttactgacgaagatgtacaaaacgaacttaaagcgcttcaagagcgtcaggctgagcttgtcgtgaaagaagaaggcgctgttgaaaacggcgatacagtcgttcttgacttcgaaggttttgttgacggcgaagcgtttgaaggcggaaaagctgagaactactcacttgaagtaggatcaggttcattcatcccgggcttcgaagagcagttaacaggccttgaagcaggagctgaaaaggatgttgaagtaacattccctgaagagtaccacgctgaagagcttgctggaaaaccggctgttttcaaagtgaaaattcatgaaatcaaagcgaaagagcttcctgagcttaacgacgaattcgcaaaagacattgacgaagaagttgaaacgcttgctgaattaactgagaaaacaaaaaaacgccttgaagaagcaaaagaaaacgaagctgacgctaaattgcgtgaagagcttgttctgaaagcatctgaaaacgctgaagctgatgttcctcaagcgatgatcgacactgagcttgaccgcatgctgaaagaattcgaacagcgtctgcaaatgcaaggcatgaaccttgagctttacactcaattctcaggccaagacgaaaacgcgttaaaagagcaaatgaaagaagatgccgcaaaacgcgtaaaatcaaacctgactcttgaagcgatcgctcaagctgaaaaccttgaagtaacagacgaagaagttgaagctgagctgactaaaatggctgaagcttacaacatgccggttgaaaacatcaagcaggcaatcggttcaactgacgcgatgaaagaagatttaaaagttcgaaaagcaattgattttcttgtagaaaaccgttaatatggttcataataatagacataataaaacagggcgcgattaattcgtgccttgttttgtacaattatgatataactctttttcttggggcaagatagtcattgccgggctgtttttcgtcatacatatagaatgtgcaagtgcgaaacacattgttaccgtcttactggaaagtatggtaaaatgcaatacatactcgatcgtagcaagaaccgttttcttttgcccttcaggtaaaagaaaaagtgagacaagattaaggggtgaaagaatgtttaaattcaacgaggaaaaaggacaattgaaatgctcgttctgcggaaaaacgcaagatcaggttcgtaagctggttgcaggaccgggtgtatatatatgcgacgaatgtattgagctctgtacagaaatcgtagaggaagagcttggtacggaagaagaagtcgaatttaaagacgttccgaagccgcaggaaatccgtgagattctgaatgaatatgtcatcggacaggatcaggcgaagaaatcacttgcggttgcggtatacaaccattacaaacgcatcaattccaacagtaaagtggatgatgtcgagctttctaaaagtaatatttctttaatcggaccgactggaagcgggaaaacacttcttgcccagacgcttgcgcgtattctgaacgtgccgtttgcgatcgcggacgctacatctctgactgaagccggatatgtcggtgaggacgtagaaaacatcctcctcaagctgattcaggcagcagactatgatgtggaaaaagcagaaaaaggcattatttatatcgatgaaatcgataaagtagcgcgaaaatctgaaaacccgtccattacacgcgacgtatcaggcgaaggcgttcagcaggcgctgctgaaaattcttgaaggaacggttgcaagcgtgccgcctcaaggaggacgcaaacatccacatcaggaattcatccagatcgatacgacgaatattctgttcatttgcggcggtgcatttgacggcattgaacaaattatcaaacgccgtctcggacaaaaagtcatcggtttcggctcagataataaagcggcagacctggaaaaagaagaactgctttctaaagttcttccggaagacttgctccgtttcggtctgattcctgaattcatcggccgtcttcctgtcattgcaagccttgagcagcttgacgaaacggcactggttgaaattctgactaaaccgaaaaacgcactcgtcaaacaatacaagaaaatgttagaacttgatgatgtcgagcttgaatttgaagacgaggcattatctgaaattgcgaaaaaagcgatcgagcgtaaaacaggcgcacgcggcctgcgttctatcattgaaggcatcatgcttgacgtgatgtttgatctgccgtcccgcgatgatattgaaaaatgtgtcattaccggagcgacagtcgcagacggtgaagcaccgcgtcttgtattaaaagacggcacagttgtcggccaagataaaacatcagcataacatgacaaaacctcctgactcgaattgatcaggaggtttttttcttgtcctgacccttctgaaaatgtttattccgggctttgctgggagatactagcggacagaggaatgaattggatacataaattgttttttcaggagggaccagcatgagttggacagggatcgcattatttgtacagctgtttttcgggatagtcatcggattatatttttggaatctgctcaaaaaccagcgtacacaaaaagtgacgatagataaagaatcaaaaaaagaaatggaacagctgcgcaaaatgcgcgccatcagtttatcagaacctttatcagaaaaggtgcggccgaaaagctttcaggacattgtcggccaggaagacggaattaaagcgttaaaagcagcgctttgcggaccgaacccgcagcacgtcattatttacggtcctccgggagtcggaaaaacggctgcggcgcggctggtattggaagaagcgaaaaaacataaacagtcaccgtttcaaaagcaggctgtttttgttgaacttgatgcgacgaccgcgcggtttgatgaacgggggattgccgatccgcttatcggttcagtgcatgatccgatttatcagggagcgggtgcgatgggccaagcaggcattccgcagccgaaacagggggctgtgacccatgctcacggcggggtattgtttattgatgaaatcggtgagcttcatccgattcagatgaataaaatgctgaaggtgcttgaagatcgaaaagtatttttagacagtgcgtattacagtgaagaaaatacgcaaataccgaatcacattcatgatatttttcaaaatgggcttccggcagatttccgtttgatcggagcgacaacgagaatgccgaatgaaattccgccggccatccgttcgcgctgtcttgaagtatttttccgcgagctggaaaaggatgaacttaaaatcgttgcgaaaaaagcagccgacaaaattcagaaagagatttctgacgaagctctcagtgtgctgaccacatatacgagaaacggacgtgaagccgtcaatatgatccagatcgccgccggcatggcggtgactgaggacagacaagaaattacgacagaagatatagaatgggttgttcattccagtcagcttacacctaaaaatgagcagaaaatcgccgatgaaccgcaagtcggcatcgtgaacggacttgctgtctacgggccgaacagcggcgcattgctggaaatcgaagtgaatgtcacacctgcgcaggacaaaggaagcctgaatatcacgggaattgcagaggaagaaagcatcggcagccaatcgaagtcgatccgccgcaaaagcatggcgaagggatctgtggaaaatgttctgacggttctgcgcacaatgggcatcaaaccttcagactatgacattcacgtcaattttccgggcggaggcccgattgacggaccttcagcaggtatcgcgatggccgcggggattttttccgcgattcaccgcatcccgatcgaccatacggtggcgatgacgggagaaatcagcctgacggggcttgtcaaaccgatcggcggcgtcattccgaaaattaaagccgcaaaacaggccggagcaaaaacggtcattatcccatatgaaaatcagcagtccattctgaaacgaatagacggaatcaccattaaagcggtaaaaacgttccaggaagtgctggacgtcatattggttgaccctccttctgaacaaaaaccgtttgatatccaaatgaataaagaatccgtataaaccccatttttataatggggtttttttatggaggacatcttttcctttttcagaacagaaagaaagggtatactacgaagagactgttttatatacagggcaggcggataagccgattttgcccgatcccggaattgtacaacgatgaaaaagttgtattataatggttcatactaaagtcacggaggtgtcagtcacatggcagaagatacaaaacgcagcatcccgctcctccctttaagaggcttattggtatacccgacaatggttttacatttagatgtaggccgtgacaagtcggttcaggctcttgaacaggcaatgatgcatgatcatatgatttttttagccactcagcaggatatttcgatagacgaaccgggtgaagaggatattttcgccgtcggcacttatacaaaaattaaacagatgctgaagctgcccaacggtacgatcagagtgcttgtagaaggaattcagcgggcgcagatccttgaatacaccgagctcgaagattatacttcggtcgatatacagctgatgcatgaggatgattcaaaagacgtggaagacgaagcgcttatgcggacgctgctggaccattttgaccagtacataaaaatttctaaaaaaatctccgcagaaacgtatgcggctgtgactgatattgaagagcccggcagaatggcggatatcgtcgcttctcatctcccgctgaaattaaaggacaagcaggacattttagaaacggcggatattaaagaacgtctgaataaggtcatccgttccattcataacgaaaaagaagtgctggagattgagaaaaaaatcggtcagcgcgtcaaacgttcgatggaacgcactcaaaaggaatactacttgcgtgaacagatgaaagccattcagaaggagcttggcgacaaagaaggaaaaaccggcgaagttcagtcgctcacggaaaagatagaagaagcaggcatgcctgagcgtgtcaaagaaacggcgcttaaggaattaagccgttacgaaaaagtgccgtcaagctcagcggaaagctctgttatccgcaactatattgactggctcatcgcccttccgtggtcggatgaaacagaagataaacttgatattaaaaaagccggggaaatcttagataaagagcaccacggcttagagaaagtgaaagagcggattttggagtatttggccgtgaaacagctgacgaaaacgctgaaagggccgattctttgtctggccggacctccgggagtcggtaaaacatctcttgcaaaatcaatcagtacgagcatggggcgccgttttgtgagaatttcactgggcggagtgcgcgatgagtctgaaatccgcgggcaccggcgcacatacgtcggagcgatgccgggccgtattatacaggggatgaaaaaagccggcaaacaaaatccggtctttctcctggatgagatcgacaaaatgtcgtctgatttcagaggcgatccgtcttcagcgatgcttgaggtgctggatccggaacaaaacagcacattcagcgaccactatattgaagagacgttcgatttatcgaaagtgctgtttatcgcgactgcgaataaccttgcttccataccgggacctctcagagacagaatggagattatcagcctgtcaggctacactgaaaacgaaaagctggagatcgtgaaagaccacctgcttccgaaacaaatcaaagagcacgggctcacaaagagcaacctgcagattcgggatcaggcgattacggacatcatccgctactatacgagggaagccggcgtgagaacgcttgaacgccagattgccgccatttgccgaaaggctgcaaaagccattgtgtctgaggagagaaaacgcattaccgttacagagaaaaatctggccgactatctcggaaaacggatattcagatacggacaggcggaaaccgaagatcaaatcggggttgtcacggggctcgcgtatacgacggtcggcggagatacgctgtcaatcgaagtgtcattgtcgccgggaaaaggaaagctgattctgaccgggaagctaggagatgtcatgcgggaatcagcgcaggccgctttcagttatgtccgctcgaaagcggaacagttcggaatcgacccgaaattccatgagaagtatgacattcatatccatgtccctgaaggagcggtgccgaaagacggcccttctgccggaattacgatggccacggcgctcgtttcagcattaacggaccgtgcggtaaaacgcgaagtcggtatgacgggagaaatcacgctgcggggccgcgtgcttccgatcggcggactgaaagaaaaggcgctcggtgcgcacagagcgggcctgactactattattgcgcctaaagataacgaaaaagatatagaggatattccggaaagcgtcagagaaggactgaagtttatattcgtttctcacctggatgacgttttggaacatgccttagtaggagagaagaaatgaaagtcacaaagtcagaaatcgtgatcagcgcggtcaaacccgaacagtaccctaatggggggcttccggaaatcgcgctggcgggaagatcaaatgtaggaaagtcatcttttatcaattcattaatcaatcggaaaaacttggccagaacgtcatcaaaaccggggaaaacacagaccttaaacttttacatcatcaatgatgaattgcattttgtcgacgttcccgggtacggatttgcgaaagtttccaaaagcgagcgggaagcatgggggagaatgattgaaacctatatgacgacccgtgaagagctgaaagcctgcgtgcagattgtcgacctcaggcacgcgccgtctgctgaagacgtgaacatgtatgaattcctgaagtattacggcattcccgtcatcgttatcgcgacaaaagcggataagattccaaaaggaaaatgggacaagcacttaaaggttgtcaaacagacgcttgatatggatcctgaagatgagctgattttattttcctctgaaacgaaaaaaggcaaagatgaagcatggggagccattaaaaaaatgatcagccggtaatgaaaaacccaaaacgcagtgcgttttgggttttatcgtatagttttgttccgcttgataaacaataataaaaggctgattccgatgaaaacatacggccagtatgttttgaagtgttccgtcggaatatggacggactccagccatgccgtaatttgtttaaagaagtataaaaagagggaaaaaccaatcatggcaaccgcttcgtatacatattcttttctggctgccgcaaataaggagaatccgaagacgaagagaatcatttcaaaatctcccggccaccatgagagctcaggtttggcgaaaaagtgtaaacctatgccgaaaagaagcatgccgatcaggacgtgaggcccggccgcttcctttttgccctggtacgagagcatggcgcccaagagcataaggagcaccggccattccccctgattcgcaaacaggtgaacctgtccgctctgaagccatgcgaataatgaagcggcaagcagaagtcccggtaataaaattgatgtttttttcatcctgtcacctacccgcagtaaaggatttttagtatgatgattacagtggaaacgagctttttatactatagcacaacatttttgaaatctgttcacattttttccgaagaaactatgttataatcattctaaataataaattctatgttagaatgattataaataaattgcgatgtacgggggtgcatgaaagcgatgcatattcttgttgtgggagtagattataaatccgcccctattgaaatacgcgaaaaaataagttttcagccggatgagcttgcagaagcgatgctccgtttaaaagaagaaaaaagcgttcttgaaaacattatcgtgtcaacctgcaaccgcaccgaaatatatgcggtggtcgaccagcttcataccggccgttattatataaagacatttttatccgaatggttctcgctgccgaaagaagagctgtctccgtttctgaaattttatgagagcgacgcggcgatcgagcatttattccgtgtggcgtgcggtttggattccatggtcatcggagaaacgcaaatactcggccaggtccgctcgagctttaaaacggcgcaggcagaaaagacgatcggcaccattttcaatgagctgtttaaacaggcggtgaccgtcggcaaacgcacgcatgccgaaaccgatattggcgccaatgccgtttccgtcagttacgccgccgttgaactcgcgaaaaaaatcttcggctcattgtcaaataagcacattttgattctcggtgcgggaaaaatgggcgagctcgccgcagaaaacctgcacggtcagggtatcggcaaagtaacggtcatcaacagaacgtttttgaaggcaaaagcgcttgctgaccgtttctccggagaagcgcgcagcttaaaccagcttgaacatgcacttgctgaagctgatattttaatcagttcgacaggcgcaagtgatttcgtcgtgtctaaagaaatgatggagagagcgggcagacagcggaaaggccgcccgttatttatggtggatatcgctgtgccgagggacctcgatccggcgctgaacgatcttgaaggtgtttttctgtatgatattgatgaccttgaaggaatcgttgaagccaacttacaagaacgccgtgaaaccgctgaaaaagtcgagctgtttattgaagcggcaattgttgagtttaagcagtggcttaatacgctcggcgttgtgccggtcatttcggcgctgcgtgaaaaggcgctgtccatccagtccgatacgatgcagagcattgagcgtaagctgcctcatctgacggtaagagagaaaaaacttctcagcaaacatacgaaaagcatcattaaccaaatgttgcgcgacccgattctgaaagcgaaagagcttgcggctgaagcggattcagatgaaaagctgaagctgtttatgcagattttcgatattgaggaagaggccggccgccagctggacaaaagcctggataaccgccagacggttcattcgtttcaaaaggcagaagcaaaaacgggcttacgtccgcttgtaagtgagtgagggctgtatgattgatacagcaatggcaagacttaatgaagcgacaattgttatttatgcagtcagcgtccttttttactttatagattttcttcaacacaaccggaaggctgggaaaatggccttctggttgctttctattgtctggactctgcaaaccgtctatctttcttatttcatgtggcagacgggcagatttccggtcttgaatattacggaggccctttacttttatgcgtgggtgcttgtcacgctctcacttgtggtcacgcagattctgcgcgttgattttatcgtgtttttcacgaatgtcatcggtttctcgatgattgcgatccatacgttttcaccgacggatcagcattcggccgctttttccggccagctggtctcagagcttttggtcattcatattacaatggcgattctgtcttacggcgctttttccctttcttttgttttttcgcttctttatcagtttcaatattctttattaaagaagaaaaagtggggaaaatggctgttgagaattgaagatttgtcaaaacttgattatatggcttacgttttaaatgtcatcggggttccgatgctgctgttgagcctgatattaggcgtgatctgggcgtatgtgtcgctggaaacgctgtactggtttgattcaaaagtgctcggttcgtttattgtgctgcttttatacagctactatttatatatcagaatgattaaggaactgcagggaaaagtggcggcgttatggaattcagcatgttttctcgtgctgatgattaattacttcctgctcggaagcctgtcgcaattccattggttcagttaacgcacgcgcccaaacagattcgggaggaaagaaaatgagaacgattaaggtaggttccagacggagcaaactggctatgacccagacaaaatgggtgattaacaaattgaaggaattgaacccttcctataactttgaaatccgggagattgtcacaaaaggcgaccgcatcctcgatgttacgctgtcaaaagtgggcggcaaaggtttgtttgtcaaagagattgaacaggcgctgctgcatcaggagattgatatggcggttcacagcatgaaagacatgcccgccgttttgcctgagggtcttgtcataggctgcataccgaaacgtgaggatccgcgtgatgcgctgatttcaaaggggcatcaaaagctggacgacataaaagaagggggcatcatcggcaccagcagtttaagaagaagcgcccagattcttgctgaacgccctgaccttacaattaagtggatcagaggcaatatcgatacgagacttcaaaagcttgaaacggaagattacgatgctattattttagcggctgcggggctttcgagaatgggctggaaagatgatgtcgtatctgaatttctcgaaccggaccgctgtctgcctgcggtcggccaaggcgctcttgccattgaatgcagagagtcggatgaggagcttttgaagctgtttgcgcaatttaccgatgagtatacgcagcgcacggtggcagccgaacgggctttcttacacgcgatggaaggcggctgccaagtgccgatagccgggtatgcgtccgtcaatgaccgggatgaggttgaattggtcggtcttgtcgcgtctccggacggaaagacgatttataaagaaacagcggcgggacatgatccggaagaaatcggaaaacgctgtgcggcgatgatgtctgaaaaaggagccaaagcattaatcgacagtgtaaaacaggagctcgatcaggatggcaaatgaccttcctttacaaggaaagaccgtgcttgtcacccggaacaaaagacaggccgcaccgttccgaaaaaaagtagaggcgctcggcggaacggctgtttccgcttcgctgatcgcttttcaggaagcactcccggatgaatgtgcggacagtctccgggaagacctttctgagccgggatggcttgtgtttacaagcgtaaacggtgtccggttctttttttcctatcttgatcgtcacggtcttgcgctttcgggacggaaaaaaatcgcagccgtcggtgaaaagactgcgcgcgccctgaaagagcggggagcccggacggatgcgatgcctgacgagtatgtggcggaatgtctggctgatactttaaaacggcacgcatcagctgccgaacccatttcagtgataaagggcaatttatcacgcgatgtcataaaagcggagcttgagccgcttggctatcaaataagggaatgggtgttatacaataccattcaggatgaaaaaggcatggacgagctgagactggctgcatcccgctctcattttgattttattacgtttaccagctcatcggcggtgcatacgtttatgcacgcggtcggagacggggaaaaagcgtgggaaaacagcggtgcgagctatatcagcatcggccctttgacagagaaagcgctcttggaatacgggatctcatcccatgtgcctgtcacttatacgattgaaggcatgctggacgtcatgtgcagcatgtcgggaaaggattgataatgatgaatcaaacatttaacagacaccgccgtttgcgcgcgaacgctgcgatgagagatttagtaaaagaaacacgtcttcacccttcagattttatttacccgttatttgtcgttgaaggactcgaaggaaaaaaagaagttccttccatgccgggggtttatcatgtatcactcgatttgttaaaggatgaaatggctgagctgatatcgctcggcattaagtcggtcatcgttttcggcgtgccggaagaaaaagacgcctgcggaacccaggcttttcatgatcacggcattgtgcagaaagggattgctgaaattaaaaagcattatcctgaaatgatcgtaatcgctgatacatgcctctgtgaatacacggatcacggccattgcggcgtcgtgagagacggagaaatcttaaatgacgagtcgcttgagctgctggcgcagacagccgtcagccaggccaaagccggcgctgacatcatcgctccttcaaatatgatggacggttttgtcacagtgatcagggaagcgctcgacaaagaaggattcacgaatattccgatcatgtcttatgccgtgaaatattcaagtgaattttacggtccgttccgcgacgcggctgacagcacgccgcagttcggagaccgaaaaacatatcagatggatccggccaaccgcttggaagcgctccgtgaggctgaatcagacgcggcagaaggcgctgactttttaatcgtcaaaccgtctatgtcatacttagatattatgcgtgatgtgaaaaaccgccatcacctgccgctggtcgcatataatgtgagcggggagtattccatggtgaaagcggcagcccaaaacggctggattaaagaaaaagaaatggtgctggaaattttaacgagcatgaaacgtgcaggagccgatctgattatgacgtatcatgcaaaagacgcagcaaaatggcttgctgagtaacgatttcatttgacgggagctgaggcagatgagaagctatgaaaaatcaaaagccgcttttaaagaagcgcagaaactgatgccgggcggagtgaacagcccggtgcgcgcgtttaaatcagttgatatggacccgatctttatgcagcgcggaaaaggatcgaaaatttttgatattgacggcaatgaatatatcgactacgtcctgagctgggggccgctcattttgggccacacgaacgaccgggtcgttgaaagcctgaaaaaagtagccgagaacgggacaagtttcggggcatctactgaagtggaaaacgaactggccaaattggtcattgaccgtgtgccgtctgttgaaatcgtgcggatggtcagctccggcacagaggcgacaatgagcgccctgcgtcttgcaagaggatataccggacgcaacaaaattttgaaattcgaaggctgttaccacggccatggtgattcgctgctgatcaaagcgggatccggagtggcgacactcggccttccggacagcccgggcgtgccggaaggaatagcaatgaatacgattactgttccatacaacgacttggaaagcgttgcactcgcattccgggagtacggtgaagatattgccggggtcattgttgaaccggtagcaggcaatatgggcgttgttccgccgcaggaaggctttttacaaggacttcgcgacattacggaacagtatggcgcgctgctcatttttgacgaggtcatgaccggttttcgcgtggattataactgtgcgcaagggtatttcggcgtgacgcctgacttaacgtgtctcggcaaagtcattggcggcggtcttcctgtcggtgcgtatggcggaaaagctgatattatggaacgaatcgcgccgagcggtccgatctaccaggcgggaacattgtcaggaaatcctcttgccatgacagcgggacttgagacgttacagcagctcacacctgaatcttaccaagaatttgtgaaaaaaggcgatatgcttgaagaaggcatttcaaaagcagctgaagcacatggcattccgcacacgtttaaccgggcgggttcaatgatcggcttctttttcacaaatgagcctgtcattaactatgaagcagccaaatcttctgatttaaagctgttcgccaaatattataaagggatggctgacgcaggcgtatttctgccgccgtctcaatttgaaggattgtttctctccactgcgcatacaatggaggatattgaaaataccattcaagccgctgagaaagtgttccaggcgatcagccgctgatacagaaaagccgatgcaagcaagacttgtatcggcttttttcaatgcctccattatcatatttccccggattgcggcatacacctttagtgacatctaattgtatggattagatgaaaggaggatatgaacttgccgcataatcaccgattgcaattttctgttgaagaatcaatctgtttccaaaaaggacaggaagtttctgaattactttcgatttcattagaccctgacatcagggtgcaggaagtaaatgattatgtctcaattaaaggatcactagaacttactggcgagtacaacatagatcacagcagtcattttgaagagcttgatagggagctgaggcatgtagaggaagtgagggcgagggaggatggcacggccgagctcattcattgtttcccggtggacattacgattccgaaaaataaagtgagccacctcaatgatgttttcgtatttattgatgcctttgattatcagctgacggattcaaggatcttaaccattcaagctgatttggcaattgaagggctgcttgaggaatccgagccaaaagagccggagatccctttgtacgtggcgcctgaatttgccagagaagaaatgatcaatcttgccggacatcattctgagggcgaaaacgaaccagaattaatgatacgccatgagcctgaaatacctttgactgtatcagaagaagcagcacaagaaaccgagaagaacgaggaagaaatcccgcctttaatcaggctggaggaagaagagcaggaagc

SEQ ID NO: 37 - DNA, 98134 bp, Bacillus amyloliquefaciens
ctttaaatactatccattaaatactttctttgtataataatttcttattattctaaggaggatccagtcatgaaatggtacgcactttttgtagagtccggaaaagaagaagcagtgcaaaaatttctgcgtctgcagtttgatgagcaggctctctactcaatcatacccaagaaaaaagtcacagaacgaaaagccggaatcaaatacgaggcactcaaaaagatgtttccgggatatgttctgtttaaaacgaagatgacagagcggacatttcataaaatcaaagaactccccatttcatgcagaatcgtgaataacggcgcatattattccaaagagcgtaaaacctatttcacgacaattaaggatgaagaaatcctccctattatcaggctgatcggagaaggagacactgtagattattcaaaagtctatattgaaaattcaaaagtaaccgttgcctcagggcctcttaaaggaatggaaggcattattaaaaagatcgataaaagaaaaagacgcgccaaaatctgcctgtcttttatgggactggacaaaatggtcaacgtcggaattgaagtgctctccaaaccctagcatttcaaaaaaagcatcaacagcatgtgccgttgatgccctttttatataaacagacgaaagcccgacaccaaaataactccgctcaccaccgtcacggtcagactttttgttttcaaggcatagttgacctgaagccgtgctgcgcccatgaggcaaaaatcacatttaggggaagataaatccagagcggtgaattgacggttgagcttcatgacgaaaagcaagtgctgacttcgggcgatgccgcacagttattttaattcctcggatgaatcggtgacatattttatgctggtctattatcctgaaccggcttaaacgcacatcaggcttcttcagacagaagcctgacggaccggacagaaggtgtctgcgtctcctttgcatgagctgtcaaaaggccgagctgcctggagacataccggtcgaaccgtttgatgagcacatcacaatcattcaccaaaagctgcggcaagatgctgatccccagattgttccgcaccattgcaataatcgcttcatcccctctgatttgataagcgacccgcggcgtaatcttttcttccttcagcactttcagcacatcaaaatgtgtctccggataaggcacgatacatttgacggactccatgacatgtaacggaaccgtttcacattgcgccaattcatgctgcgggctcatcaccgctacaatcgggtcttcggccaacgggtaaaaataccacttctcgctgtgggatgtcccgatcgccgcatcaatccggtcatctttcagccattcttccagttcagtagaatttccttcaaacaaatgcaccttaatggaaggatacagctcatgaaattccctcaaaattttcggcagccattttacggccacgctcgtaacagttccgagccggacttcccctctttctaacccattaatattatcaacggtttcagacagtttttcatagtttttttgaatttccttcataatatgtaacactttcaagccatttgcggtgggcctcactccatgccgctgtctgatcaaaagcggaaaaccgtactcttcctctaatttactgatcatttggctgatgttcggctgtgtgtaattcaatatggcagcggcttgggtcaggctgccgctttcaaccgttttaataaaggctaaatgcttctttaaatccaaccggcttcatctcccagatatcattctttattatccaatgcattagttatatttagtttacttatatatcaatcaaaaataaaatggcaatgtctccatcattatacttgataacaaacagaaggtgagcgtttcagcatgagttttctcattcagttttttatcggcggcaccgttatggtggccgccgcgtatttaagcaagtcgaaatacttatttttatcaggcgttatcacattgctgccgatcatgacgctactgaatattcacttgcagctgaaaaacatgagccccgacgatttcagagccgctcaaaaaaacggaatattcggtgccttcggcgcagtgatcttcgtcagcagtattttcatcctgacaaactggttcaaaggtggccacgcagtcatcggtgcgtttctcatctatatttgctatatgatcagctgtaaatgcctgttatgaagatacggcatcgctgtgtataaaaaaatgcctttccagaacaataataacaatgcgctcagtcgtgagcagtttatatgactgaatgatcatgaattgttataattaatgtctacaaacattccgggaggcgaaataaatggccagaaaattatttaccccatggaccgttaaagatgtaacgatcaaaaaccgtattgttatggcaccgatgtgcatgtattcctcacatgagaaggacggaaaactgcagccttttcatatggcgcactatatatcgcgtgcaatcggtcaggtcggtctgattatcgttgaagcgacagccgttaatccgcagggacgtattaccgatcaagatttgggcatttggagcgacgatcatctcgaaggctttgccaaactgacagaacaagtgaaagcgcaagggtctaaaatcggcattcagctcgcgcacgcgggacgtaaagcagagcttgagggagacatttacgctccgtcagctattccgttcgacgagcagtccaaaacaccggctgaaatgacgacagaacaaattaaagaaaccattcaggaattcaaacaggcagcggcgcgcgcgaaagaagccggctttgacattattgaacttcatgcggcacacggctacttaatgcacgaatttttgtcccctctgtccaatcaccgtacagacgaatacggaggctcacatgaaaatcgctaccgcttcttaggcgagaccattgaagccgtcaaggaagtctgggacggcccgttatttgtccgtatttctgcatcggattatacagacaaagggctggacattgcggatcatatcggttttgcgaagtggatgaaagaacagggagtcgacctcattgattgcagctcaggcgcactcgttcaagctgatattaacgtcttcccaggctaccaagtgagcttcgcggagaaaatccgtgaacaggccgaaatcgcaacaggcgccgtcggtttgataacgacgggaacaatggcggaagaaattctgcaaaacaaccgcgctgaccttatttttgtcgcgagagaacttctgcgcgatccgcactttgcaaggagtgcagcgaagcagctgaatactgaaataccgtcaccggttcaatacgacagagcatggtgatgaagtgacagccggagtttttcgatccggctgtctctttttttattttttgagaaacgattgccgaagcttctccgtcttccctatagaaccaattagaggggatgactccaatgaaagcagcatggatggaaaggacatatctgattgacgggtgtccgttttatacgaaacaccgtaaaggcgccggcgaagtgacgatcgtctttgaagccggctacggcacttcttctgaaacatggacatcattactcgctgacatagatgaagaatttggggttttcacatatgacagagccggaatcggcaaaagcggacaaagccgaaacaagagaacggcggaccacatggtacaggaattaaacactcttcttctgaaggccggcgtcaagcctccttatcttgtcgtctcgcattcatacggcgcgattatcagcagactttgggcgagccggaaccgccgggatattctcgggatggtgatgcttgatccggtttctgaggatcaggagacgaaagtgcttccgcttcttcccgaagaaatgaaagctgcctatttgaaacagttcgtattggaaggatcacacgcggaatttttgacgagccttcgtcagatcaagcatcagcagattcatttcggcgatatgccgctgttgattttatcatcgggagagcgggatgagcacttaaagcacgctcatgaacaatgggtgaaactgcacagaagcatgcttgatgtctcttatcaaagcggatggattcaggccaaaaacagttctcatgccattcaccacgatgaaccgcacatcgtccaccttgccatttatgatgtttggtgcgcggtgcgccagcaaatgaatgctcctgcctatcaggcggtaaactgataaaacaaaagccattgtgcaacggcacaatggcttttgttatcgtgatctattttgtctcacgatgcaacgtatactttttcaaccggggggaatactttttcatttctaaccggtccggattcgtccgtttgttcttcgtcgtaatataatttctgtcccctgtctctgtacaggccaatgtaacatttacacgcatcattttcaccccttatacaaatcgtaattattacgttttattatatctcaccagaaaaaaatgtcaagcgttcattttttaagaccgctccacagtgacctccatgaagtcaaatccgatcttactgttttcaaataccgctttcgcctcatgttcgagacgctctatcggcgattcaccctgataccttgcgctgatatgagttaagatcagctgtttggcgcctgctttttttgccgtttgcgcagcctgttctgtcgtcgcgtgataataattatgtgcgagctttgcatcttccttggcaaacgtcgcttcatgaacaagcacatccgcattgcgcgccagctccgttacccgctctgatgccctcgtatccccggaaaaagcgacgattctcccttttttcgggggttccaaaaaatcccgcccgttaatgattctgccatcgtcaagtgtgaccgtttcgccttttttgattttctgatagacgggtccgggcgggatattcatttcttttaatctgccggcctgcaatgcgccgggaatatccttttcctgaacccggtagccgaacgcttccacgccgtgaatgacggatgctgcggtaacaatgaattgctcatcttcaaaaaccgtcccctcttcgatttcatgtacggtaagaggatacgtcagatgagtcgccgtcacgttcaggcttgtttcgataaaggctttaataccttttggcccgtaaatcgtcagctcttcttcaccgccctgaaatgaacggctccccaacagacccggaagaccgtaaacatggtcgccgtgaaggtgggtgatgaaaatcttctcaattttcctcggtttgattgttgtatgtaatatctgatgctgagtggcttctccgcaatcaaacagccatacggaacgcctttcttcaagaagcttcagcgcgacggacgttacgtttctcgtctttgccggcatgccggcccccgtccctaaaaataataattccacaatgcttcctcctagatctttgtactactaaggatacaggatcaggctgaaaatgtgaattcacccgggccttctccggcctgattaatttttttccgcaaaccgcaaaaaacaggctgaaatgtttgctttcaacgaattttagatttaaaatgaaggaaatatgcggggttttaaaccatgcttcagataaagtgaggtactctaagtgaaaacaaacgacaaaccaaaagcagtaattgtaatatttggtgccacaggggatttggcaaaacgaaaactttacccatccattcaccgtttatataaaaatggtcaaattggtgaagagtttgcagttgtaggtgttggaagaagaccttggtcaaacgaggacctccgggaaaccgttaaaacgtctgtttcttctgccgggcaaaaagacatagacgatttcacatctcatttttattaccatccgtttgatgtaacgaatccgggttcctatcaggagctgaatgtcctgcttgatcagcttgaacatacatatgaaatcccgaacaacagaatgttttacttggcgatggctcctgagtttttcggcactatcgcaaaatcacttaaaaacgaaggtgtcacagcgacaaatggctggtcccgtctcgtcattgaaaaaccattcggccatgacctgccgagtgcgaaagagcttaacaaagaaatacgcgaagctttcacggaagatcaaatttaccggatcgaccattacttaggcaaacaaatggttcaaaatatcgaagtcatccggtttgcgaatgcgctgtttgagccgctgtggaataaccgctacatctcaaacatccagattacgtcaagtgaggatctcggcgttgaggatcgcgcgagatattacgagaaatcaggcgcactccgtgacatggttcaaaaccacattttacaaatggtcgctctcttggcgatggaaccgccgattaaactgaacacggaagaaatccgcagcgaaaaagtgaaggtgctgagagccctccgccctgtcgctccaaacgaagtaagtgacttcttcgtccgcggacaataccaagcgggaacgattgacggaaacgctgtaccgagctatacagatgagcaaaatgtagcaccggattccaatacggaaacattcgtgtccggaaagctgttaatcgataacttccgctgggccggcgttccgttttatatccgcacagggaaacggatgaaagaaaaatcaacgaaaatcgtcgttcaatttaaagacattccgatgaacctttattacggcaatgaaacgaatgtaaatccgaacctgcttgtcatccatattcagccggatgaaggcatcacactatatctgaacgctaaaaaattaggcggagccgcacatgctcagccgattaagctggactactgcagcaactgcagtgatgaaatgaacacaccggaagcctatgaaaaattaatccatgactgtctgctcggtgatgcgacaaactttgcccattgggacgaagtggcgctttcatggaatttcgtcgatgcgatttccgaaacgtgggcagccgacaaaaccctttctccgaattatgaagccgggtcaatgggaccgaaagcttcggacgatcttcttgaaaaagacggtctccactggtggaatatataagaaaacatcaaaaaaccgcggcgccgttcatgacggcccgcggtttttaatatcagaaaagcccccgcagttattgcgggggcttcttcattacttcatccattcagtatggaagatgccttctttatctgtgcgttcatacgtatgcgcgccgaagtaatcacgctgcgcttgaatcaagtttgcaggaagcactgccgtacggtagctgtcgtaatacgcaagtgcgcttgagaacgaaggtaccggcacgccttgggctacggcaagtgaaatcacttggcgaagggcgccttggtagctttctgcaatgtttttgaagtagctgtctaacagcaggttgtcaagctccggttcacggtcatatgcgtctttgatcttttgcaggaacgccgcgcggatgatacagccgccgcggaagatcatcgcgatttcaccgtatttcagatcccagttatattcttcagacgcggctttcatttgggcgaagccttgtgcgtaagaacagattttactcatgaagagcgcttttctgaccgcttcgatcagctcttctttattttcagtgaccggcttaacgtctggcccggacagaaggctgcttgctttcacacgctcttctttcattgcggaaatgaaacgcgcaaaaacagattcagtgataatcggaagcggcacgcctaagtcaagagcactttggcttgtccatttacccgttcctttttggcctgctttatcaaggatgacgtcaacaagcggtttgcccgtttcttcatcttttttagtgaaaatgtcagccgtgatttcgatcagatagctgtcaagctctcctttgttccactcagcgaatacttcgtgaagctcttcggcagacaatccgagcacctgtttcaaaatgaaatatgactcagagatcagctgcatgtcaccgtattcgataccgttgtgcaccatttttacatagtgccccgctccgtccgggccgatgtatgtcgtacaagcttctccgtccactttagcagaaatggcttctagaatcggtttcacgagttcgtgcgcttccttttggccgcccggcataatagaaggccctttcagcgctccctcttcaccgcctgatacacccgttccgataaagtgaatgccgctttcggcaagctctttgttccggcgctgtgtatctttatagtatgtatttccgccgtcaatcaaaatatcgtctttttccagatgaggaagaagagattgaatcgtcgcatccgttgcagttcccgctttaaccattaataaaattttacggggtgtttcaagagactggacaaactcctcaatgctgtatgtaccgacaacatttttgccttttgcctcttctaaaaactcttccgttttgctgcttgatctgttgtatacagacacagaaaatccccggctttcgatgttaagagccagatttttacccattaccgcaagaccgataactccgatttgttgttttgacatattctaacgtcccttcttcaaacgtttaaccattttaaaatttaaattaaaataaaatgatatttatactaaagaaattatcatacataaccccttttttcaagttattcaccttttcttttcatcctggaaaaagtctctgttaaagctcgttccccttgttttactttcttctttttttataacggcgccttttctgatcaggttttggccgtacttttcattcagctcgttcatcatctgaaaaattggctcatcctttgcgtcctccttgaatgaaaacagatcaagctgtttatacgcctgctgtttttcaaccagttccgttccggtgatgccgagaagccttaccgggttttggttccagtgcttgtcaaacagttccatcgccgcttccatgatgtcttttttctgatcagccggattgctgagggtcatgcttcttgtgactgttttccaatccgcataccgaatcatgatgaacagccggcaggccatgacctccttgcgctggagccgttcgctcacagacagcgcgagccgttcaaacacgcccgttaattcatcccagtcagccgaatcatgcgacagggtggatgagttgccgacgcttttaaattcataaatccgctcgggattgacttctgcaggatggatgccgttcgctttatccttcagcctcgggccgtttatgccgagaagcgttttcagcgcatgttcatctccttttgccaaatcaccgatcgttttgatgccgagcgtttttattttttccgcagttttcgttcctataccgtgcatctcttcaatcggaagaggccataagacgtccggcagctctctttttcttaaaatggtgatgccgagcggttttttcatgtcagacgccattttagcgagaaatttattcggggcgatgccgatgcttgacgggagcaaaagctctttttgcagtctcgcctgaatgtcttcggctgtctcatacgccctgtgtctgtgcggtgtgtccgtaatatccatgtatccttcatcaatagaaacaggctcgactaaatccgtatactccctcagaatgctgaacatttcttttgatgaactccggtagcggtcaaaattcggaggcacgacgatgagttccggacagaggcgttttgcccgccacaccggcatggtggtctttacgccccgcgctctcgcttcgtagctgcaggtgacgatgattcctttccgttccttcacgtttccggcaacggcgataggttttcctcttaaagacggatcatacgccatttctacggaggcataaaaactgttcatatcgatatgaaatataattctcccttttccggccactcccggcgcctcctttcctttcatagacaaccttatatatatgtagtaaaataagagctgaatggatgtgataaaatgattcttgagtcaatgaatgactttttatttttagtcgattttttcacaattattcttcccgctctgaccgcgatcggcatcgcttttcttttgcgtgagcgccgcgcaggcgagcattggagaacgaaacgaatagatgaacatcaagcagtcgttcagctgaaccgaacagactttcttattattatatatcatcgcattacaacttggatacgtaaagtcatccgcatgaattcaccggcgaatgatgatgaagatgtcagcttcctccttttataacggcaagtgaagataaaaaggaggagacataattgtctaaaacatatcaaaaatggatcgcattcggattgttttttatcgtactgtgcacaggccgctcggcttttgcggcgacatctcagactcagacgggaggcctcgggaatatcggttttttccacgattacctgatcgagccgttttcggcacttttaaaaggtgtggcgggcctgttccacggtgagtacggactgtcgattattctggtgacgattatcgtccggatcgttgtattgcctttgtttgtgaaccaatttaagaaacagcgggtgttccaggaaaaaatggctgtgatcaaaccgcaggtcgacagcatccaggctaaaataaaacaaacgaaagatgcggaaaaacaaaaagaactgcaaatggaaatgatgaagctttaccgtgagcacaatctgaatccgatggcaatgggatgtcttccgatgctggtgcaattcccgattttgatcggtttttattacgccatccgctcaacgccggaaatcgcttcacactcatttctgtggttcagcttagggcattctgatattcttgtatcactgtgcgcgggggccgtgtatttcttacaggcttatatttcccaaaaattaaacgagaaatattcaccggctgctcaaaatccggccgcgatgcagtcagcaaaaatcatggtctttattttccctgtcatgatgaccattttttcacttaacgtaccggctgcgctgccgctttactggtttacaagcggactgtttttgacagtgcagaatgtacttttacagcagacgcatcataaaaagaaacaagctgcggctcaggcggagcccgccaaatcataatactgaaaccctgcccgaaacctatccggcagggtttttttcttgtatctgcaaggctttaagccaattatcatgaagaatgaaaaaagcacccaaattgggtgcttcgtttttagttggccgctgtttcgataatggcaacgaccatttccgccgttttgacgagctcttcaatcggcattttttcatttttcgtatggatttgttcatagcctactgacaggttgactgtcggaatgccgtggccggcaatgacgtttgcgtcacttccgccgccgcttgtctgaagttcgctcggccggccgatttttgccgccgcttttttcgcgacttccacaacctgatcgccgtcctgatatttgaaacccggatacatgaccgcgatgtccacttccgcgcggcctcccatctcagctgcagcagattcgaaagcttctttcattttctgcacttgcgcttccattttttcaggcactaatgaacgcgcttcagccagaatatcaacctggtcgcagacgatattggtttgcgtgccgccttcgaaacgtccgatattagccgttgtttctttatcaatacggccgagcggcattttagagatagcttttgacgcgattgtaatcgcggagatgcctttttccggttctactcccgcatgagccgttttaccgaaaatggttgctctcactttcgcttgtgtcggcgcggctacaataatgttgccgacttttccgtctgaatcaagcgcaaaaccgtatttcgcggtaatgtctgaacgatccattgcttttgccccgactaatcccgattcttctccggccgtgataatgaattcaatggtgccgtgctcgatgttttgttctttcagcactttaatggcttcaaacattgcagcaagacccgtcttatcatcagcgccgagaatcgtcgtgccgtcggattttacatagccgtcttccacaatcggcttaacgcctttgccggggacaaccgtgtccatgtgcgatgtgaaataaatcgtatccgcatcttttgtgccctttaacgtacagattaagttgccggcgccatgccccgtcacttcttttgtatcatcttcttttacgctcaatcctaaatcagtgaatttttgtttgagcaccttgctgatttccgcttcatgttttgtctctgaatcaatttgaacgagttcaagaaattcttcaagcagacgtttttcgtttaccattttcagttccctccgtttaaagcggtatattaccgtgcttttttttcggtctttcctcttccttatgcgcaagcatgtcaaatgcctgaatcaattttttcctcgagtcttccggccggatgatatcatccaccattccgcaggccgccgctttatacggaccggcgttttccttttcgtaaatggcttttttttcgcgcttcgttttctccgggtcgtcagaagcctgtatgtctctgctgtataaaatcgacgccgcgccttccgctcccatcacggcgatttccgcattgggccaggcgaatacaagatctgccccgagccctttcgaattcatggcgacataggcgcctccgtaggcttttctgatgatgagcgtcactttcggcaccgtcgcttcggcaaaagcatacagcaattttgctccgtgacggatgatccccgcatgctcctgctgaaggcccggaagaaatccaggaacatcagcgatcgtcaataacggaatatgaaacgcgtcgcaaaaacggatgaatctcgacgctttgtcagcggcatcaatcgtgaggcttcccgccaagtgtttcggctgatttgcgacaacaccgactgtacgccgtccgagtttcagaaaaccgacagcaatgtttttggcaaaatacggctgaatgtcaaaaaacgttccgtcatccgccagctcttttattacctgtaacacatcgtaaggtttcgaactgtccgcgggaacgagggtatttaataacggtctggcgtcttcctttttaacgggcaatgccgtctgtccgccgtgcgggagataagaaagcagggttttcacagcggaaagagcctctttttccgttcgtgcggaatagtgggcatttccgcttatcacattatgtattcccgcaccgcctaaacttgccgcgtcaatctgttcacccgtaacctgttcaatgactttcgggcctgtaataaacatgtgcgacgtatgttccgccataatcacaaaatccgtcaatgcgggtgaataaacagcaccgccggcacacggcccaaggatgacagaaatttgcggaatcactcccgagtaaaggacgttgcgcctaaagatatgaccgtatccatttaatgataccacaccctcttgaattctcgcaccacctgagtcgttcagcccgatgatcggagttttatttttcgccgccagatccattaccgccgcgattttttccgcatgtgtctcgccgagcgtcccgccgagtacggtaaagtcatgggcaaacaaatacacgggccgtccgtcaattgtgccgtatccggtaacgactccgtctcccggagcatttcgggacccgggcatgcggcttttggcaaacggctgcagctctgaaaaactgtcttcgtccaataaatagtcaattctttctcttgccgtcagcttgccttttttgtgctgtttttcatttttttccgcaccgccgccatttgttaaaaaggaacgtctttcgtttaagtgtctgatatgatcactcatgctcatcttgagtttctcctttttcaattgtttcacaaagctcaatcaggaccccgttcgcctcttttggagagagaaatgcgatcttcttcccgcccgctcctttttgcggttcatgatggatcaaagtcatgcggcatgcttcaagctccttgatcgtttccttcatatcggcgcagcggaatgccaaatgatgcagcccttcgcctcttttctgtaaaaaagagctgacgggagacgcgtccgacagcggctcaatcagctcaagctttgtgcctcccgcttctaaaaaagcaactctcacattttggccgcttaccagctcgtctcccatatacgtaagcccgagcatccgttcgtaaaatcctctcgcagcttctatagagctgacggcaatgccgacatgatcaagttttttcatagcgcggccacctgctttccgccataggatatggcttgttcatacaagcaaaacacgttaaaatgatagacagtaatcttaaggagtgaaacaatgtctcaaaaatttatgaaaagcgccgtcatcgtcattttgggcgtatttatactttcaaccctcctctcaggcattatgatgtatttgcggtaaaaaagcaggcgcctcattgcaagggggtttcctgcttttttatgagggctttccgctctattgcaatgtcctcgaatgagcggttttcttttgtaatcaatactttcgttccgggaggaataatccggaaaatacggatgacatcccggtttttcatacggatgcagccgtttgatacaaaccccccgatcagctcttctctgtttgttccgtgaatgccgtatatcctgccgtcggttcctttcgcgtcaaaaccgatccagcggacgccgagcgggttttccggcgcgcctccctttacatttttcttccggtaatacggattgacggctttgaccgttaccgtaaattctccttcaggcgtcaaatcatccgtttttcccgtcgccacctgataaatgccttctattcggttatccttcacaacagcaagcgcatttgtggctttattgacgataatataagggtcacccggcaaaggattcgcgccaagcggtcaaagcggagacagcagcagggcggctgacaataaaaaaaatcgcatgggctcccctccttttttcattagaatgaccaatgaaaggtggactcatgcgattgatccatatgttttttacagcttgatgcctttgaaataacttttaatcacgagatattgttccatctcaccgaggaggtggaacaaagccgcccgagcttcaaactcctcgcgcgttgccgggagcggcatttcttcaaattccgttctcatttctgcaagtctttttaaaaatttatgagcagtattgccgggatgaatggcttcccttaattcatggatgaaatgggcgattattttgccctgctccaccgttattgaaatagaggtaatcttcggcagcagccgttcaatgatttcaaattgtttctgtctcatcttaaaataatgatagtagagattttcatggcgcaaaatatgattctgcacgtcccgataggcgaggtttttcgcctcttgaatcatctgatgcgtctccggtatttccttccccgaccaatcttgctcaccagttaacaaataccgttcgatttcggcgaagatgacggaaaagttgtcctcgatttttttccggtacgccgcgagttttctgtcgaggctcggcatatacagattcattaacagcgcgacgccgatacctacggtaatcagctggaactcattccagataaacgccatcgtaatgccgccggacatatataaatgaagaatgattactgagctggtgacgatcccttcgtttattcttaaaacgactgtagtcggaatgaacagcaccagcaatattccgatcgcaaacgggtaatagccgatcagcccgaaaaagacatatgagaagacgattgccaataaacaggcggcaaatcgggcccacgaggcctgaagcgaccgcttttgcgtaatctggatgcacaatatggtgatgattcctgcggatgcgaagttttgcagatgcaacagctgggctaaataaatggccagcgccgttccaagtgcggtctttagtgtccggtaaccgattttaaacattgcttgctccattctgtttgtttctttctcaaaaaaaagaagaagagcacccttcttcttttcttccagttatattttataatattttttctaaaaagtcctgtgctctttttgacttcggagaaagaaaaaattcttccggctgcccgtcttccacgatcgtcccttcatccataaataatacacggcctgcgacttctttggcaaatcccatttcgtgcgttacgatcaccatcgtcatgcccgtctgcgcaagctctttcatcacctcaagaacttctttgaccatttccgggtcaagagccgaggtcggttcatcaaacagcatgatgtcaggattcatggcaagcgcacgcgcgatggcgacccgctgcttctgtccgcctgacaaacggttcggatagtcgttccgtttgtcaagcagtccgactttttcaaggagagcgcacgccttttcctccgcctcctttttagactctttcttcacgctgaccggcgcgtatgtgatattttcaagcaccgttttatgaggaaacaaatgaaaatgctgaaataccatgccgatattttcccgcactttcagtttattcgttttagaggcggtaatttcgttttctttaatggcaatcgttccgccgctcggggtttccagcagatttaagcagcgcagaaacgttgatttgccggaaccggaagggccgatgacagcgacgacttccccttcttcgatctgtgttgaaatgtttttcagtacttcatgtttcccgaatgattttgacagattgtcgaccttaatcattggctttcagcttcctttctacgccttttccgatgaatgctaagatcaaaacgagcacgtaatagattaagcccgccacgataagaggttctaaatagttgtatgttgcggcgccagactggtaggcccgtctcataatgtcgccaagaccgataactgtgacgatcgccgattctttcgttaaggtgattaattcgttaataatagccggagaaatgtttttaaacgcctgcggcagcagcagatctttcatcatttttccgtacggcacgccgagagcgacggcagcctctttttgtcctttgtcaattgcgttgattcccgctctgataatttcagagacgtaagcggctgaattgagcgataatgcggtgaccgccgcccaaaattgatcgatctgaaagccgaggagctgcggcataccgaaatagatgatcatcagctgcagcacgagcggcgtgccgcggaatatcgaagtataaaaatccgcaatccatttcagcggactgatcgtgctgattttaaataagctgagcacgatgcctaatacaagaccgatgagcgctgaaacgagcacgattttcaatgtgaccgcaaggccttccaatataaaaggaatttgggggattgtcgctgagaaatccaaattcatacgtgtgatctcctttgtctttattcaagataaaaagctcaacgaaaagttgagctttcttttatttctcgttggtgaaccattttttcttcagtttttcgatttctccgtttttctccatttctttcagcgctttgttgaacttcgctgtcagatcactgtctttgcggaacgcaatcgcggaacccgattcgtctgatttcgcatctgctgacgcaaagccctgcagatcatgatttgaactgaaatagccttgtgctacgatgtcttcgataatcgcggcatcaaaacgcccggatttgatctcttcggttaagtctgagatccggttgcggtcttcgagctgaaaaccgtatttcgaagcgagcttcttgcctttttcttcttgaatggagccaagctgaacaccgacggttttgcctttcagatcactcagggatttaatgctgcttccctttttcgtaacgatcatattgttagcagtataataaatatcagaaaaatcaacttgctttttccgttccggcgtaggtgtcattccagataaaatcatatctacctgcttggacttcaaagctgtaatcaggctgttgaagtccatgtcccgcacctcaacgtcatagccggtctttttgcccagagcttttgccagatcaacgtcaaacccggtgatctgatcgccgtctttatattcaaatggtttatagtcagccgatgtacccataatcagcttgttctttccgccttctgagcctgaattgcctgatccgcaggcggacagcgcaaaggtgatacatgcagcagctaataccaacagccatttcttcatgattcatttcccccatatctactgatctcttaaatttgaatatttattcgttaacttgtattttaaacactttttaattgtgatgcaatactatttttgaaaaatatattttcctttctgtgtttattatagtcattgtttttcagattagtgacagctgaacgccgatgtataaatatttatatttatacagattccatataaaaaaaacccgcaagcgcttggctccggggtttttctttcacttatacttcttcacaatattcttcaaatgcttcctgcagttttgtgacgacggccatcggctcatggccttcaatttcatggcgttccaccattttcatgattttaccgtcttttaaaatggcaaatgacggagaggacggcggatagccttcaaagtattctctcgctttggctgtcgcttctttatcctgtccggcaaataccgtcacaagctgatccgggcgtttatcgtaatgtacggaatggtacgcggcaggccgtgcaataccgcctgcgcatccgcacacagagttgaccatgacgagtgtcgttccttttttcgaaagcgcttcgtccacttcctcagcggttttcagctctgtatacccggcggccgtgatttcctggcgggcttgacgcacgacatcattcataaataaattaaaatccatattcaactgggacctctcctttttgatcatctcttcttatgatagcaaggaacctccctatcggcaaatgacaccgctcatatccaattgttttttgtcccttttatgttcccgatgtaagtttatgaccctttaaaaacgggaaacttggtaaggatattgtctgaaataaaggagcagtcatatgagccaacggaaagcagttttaatttataacggaaacgccggtcaaaagcagattgataaaacgctcggcacggtcgtccccattttggcccagtcagctgacgaacttttgattaaaccgaccaaacatcaggatgatgcccgtcagtattgtgaaaatctcgacagttcagttgaccatttatatattttaggcggggacggcactgtgcatcaatgcatcaacagcatcagcaagcttgatcacagacccgctgtcggcattttgccgggaggaacgtgcaacgatttctcccgggcgctcggcatcccgcaaaaccttcaaaaggccgctgaagcgctcgcgggcggacataaacggatgattgacgtctgtaaaacggatgacggctattttctgaacttcttgggcatcggactgatcaccgaagcatcaagccatatcaatgaaactgaaaaagcatggcttggtaaaatcagctacttcacgagcgccttgcggacgatgacaagcgcgaacccgtttcctgtcaaattgacgattgacggcgaggtgaaagaagacgaagccgtaatggtgcttgtcatgaacgggcattatatcgggacaaacagagttcccctgcctgatgccagcctccgggacggcttagccgatgtgttaatctgccgcaacacaagccttgccgcgctgcgggagctgatgacgatggagcagggttcatttgatgatttcaaaggggagctgtcctatattcaggcctccagaattgaaatcgaaaccggacgtgaaatggacgcggatacagatggcgaggtatacggaacaacaccttgtacgatcgaagtgaaaaaacatcatctcactatgcttgttcccgaggattcacaatgaaaataaaaaagctccttttgccgcccgggcaaaaggagtttttttaatagacggaagtatgttcatcaatgttttctaagatctctttgacgcgtccgaggaatcggccgcacacgagcccgtcgagcaccctgtgatctaaagacaggcaaagattaaccatatcacgaacggcgatcatcccgttattcatgacaaccggacgtttgacgatagattctacctgaagaatcgccgcctggggatggttgataatgcccatagattgaactgagccgaaagatcccgtgttattgacggtaaatgtgccgccctgcatatcttccgcggtaagttttccgtttctcacttttttcgcaaggtccgttatttctctggctatgcctttaatcgttttttcatcagcatgcttaataaccggaacaaacagcgaatcttccgtggcaacggcaatggagatgttgatgtctttcttttggacgattttgtctcccgcccacatgctgttcatctgcgggaactccttgagagcctgcgccgccgcttttacaaagaaagcgaaaaacgttaaattaaagccttctttctgtttaaatgagtctttaatgctgtttctgtacgccgtcatgttcgtgacgtcgacttccatcatcgtccaggcatgtggaatttctgttttgcttttatgcatattggcggcgatggcttttctgacgcctgtaaccggaatttcaatatcaccggctgacagagctggtgccggtgcttgtttttgctgttgtttcggcgcttgttgcgttgtttgaacggcagccggcgccggtgcttccgacttctgctgcattcccgaatcaatgatcttttgaatgtcttttcgcgtaattcttccgcctgcacccgttccttcaacttcttcaagctgaatgccgtgttctcccgctaatctgagcacggccggcgaataacgcgctttatttgactgatctttaccttgacggtttgcatcggtgtctgaaggggtattctgctcttcttcccgcttcggcgcctcttcggtttccgtttcttctgtttcaattttgcagatgatctcgccgactgcaagagtctggccttcttctcctacaagttctgtaatcgtaccggtaaaagaagacggcacctccgcattcactttatccgtcatgacctccgcaatggggtcatatttattcacttgatcaccgggggataccagccacttgctgatcgtcccttccgtcacgctctctccgagctgaggcatagccatttgttcaatcgccatgtcaaaaacctccttacgtctttaaaactccgctaattctctcatcgcggcttctgctttgtcaggattcatcatgaagtatttttccattgccggcgcataaggcattgccggaacatcaggacctgcaagccgcttgatcggcgcgtctaaatcaaataagcagttttcagaaataatggcggcgacttcgctcataatgccgccttctttcgtatcttctgtgatcagcaatacttttcccgttttagacgcggcttcaatgatggcttctttatctaacggataaaccgtacgcaagtctaatacgtgtgcggaaattccgtctttttcaagacgctcggcagcctgcagagcaaaatggacgcataatccgtacgtaatgacagtaatgtcgctgccttcgcgttttacatccgcctttccgatcggaaggacgtaatcatccgcagggacttcgcctttaatcagacggtacgccctcttatgttcgaaaaacagcaccggatcttcgtcacggactgcagctttcaacagcccttttgcgtcataaggagttgaaggcatgacaattttaaggcccggctggttggcaaaaatggcctccacagattgggaatgatacaacgcgccgtgcacgccgccgccgtaaggcgctctgatgaccatcggacagctccaatcattgtttgaacggtagcgtatttttgccgcttctgaaatgatttggttgaccgcaggcagaatgaaatcagcaaactgcatctcggcaatcgggcgcatgccgtacatcgcggcgccgatcccgacaccggcaatcgctgattcagcaagcggcgtatccatcacccgctcttctccgaactgttcatagagacctgccgtggctttaaacacgccgccttttctcccgacgtcttccccgagaacaaacacgcgcggatctctttccatttcttctttcattgctgcattaatactgtcaatataagacattacagacataagtattcctccctacttcgcataaacgtgatcaagcgttgattcaggagatgcgtatggcgctttctccgcttcgtctgtcgcttcgtttacgatagccatgatgtcatccagcatggtcttttcttcttcttcacctagaagcccggcttcttgcaagtatgctttgtataaaagaagcggatcttgtttctttgcttcttctacttcttcgcgttctctgtagctgctgtcgtcgtcatcactggaatgcggcgtcaaacggtaggaaaccgtttctattaatgtagggccttcgcctttagacgcccgttcgcgcgcttcttttacgacccggtaaacttccagcaggtcgtttccgtcaacagtgactcccggcatgccgtagcctgccgcccggtcggatattttctcgcacgccacctgtttgtcatacgggacagaaatggcatacttattgttttcacacatgaaaatgaccggcagtttatacacggcggcaaagtttgccccttcgtgaaaatccccctggttggaagatccttctccaaaggtaacaaaagagacgatatcctttttatccatgcgtcccgcaagcgcgattccgactgcatgaggaacctgcgtcgtaacaggggatgagcccgttacgattctgttttccttttgcccgaagtggcccggcatctgccttccgccagagttcgggtcagctgctttcgcaaaacccgacatcatcaaatcctttgcagtcataccgaatgcaagcacaacccctatatctctgtagtacggaagcacatagtcggtatcacggtttaaggcataggccgcgcctacttgtgccgcttcctgtccttgacatgaaacaacgaacggaattttgcccgagcggtttaagagccacattctttcgtcgatttttctggctaacagcatagttctatacatttcaacggcttcttcgtcagagagccctaatgcttgatggcggtttgtagtcattcaaacccctccttctttccttttaaaaatgaatcgcgtttccgtctgcggctaacgcagcttctccaatcgcttctgacagcgacggatgcggatgtatggactggccgatttcccaaggcgtcgcgtcgagcaccttggcaagccccgcttcagagatcatatcggtgacgtgcgggccgatcatatgaacaccgagaatatcatctgtattccgatcggcgacgattttgacaaagccgtcgctttctccgtatacaagagcctttccgatcgccatgaacggaaacttcccgatcttcagttcatgcccttttcgaagagcttcctcttctgtcagaccgacgctcgccgcttccggatttgaataaatacatctcggcacaagagcggcatcaagtggagccggattaagacccgccatatgctcaacggcaatgatgccctcacgggaggccacatgcgcaagctgcagcccgccgacaacatcaccgatcgcataaatgtgcgattccttcgtctgcccagcttcgttcacgatgatagaaccgttttccgcttcaatatccgtgttttcaagcccgatcccttcaatgttcggctggcggccgatggaaacaagcatttgttccgcgtgatacgtttctttttttccattcttttcagcggcaattgaaacgccgtccgctttttccaatgtatccggaagcactttcgcacccgtcacgatcttaattccttttttcgttaacagtttttccatctcgcttgaaatatcacggtcttccgtcggcaaaatgcggtccgcatattcaatcacagtggtattgacgccgaaatcgttcagcatggatgcccattcaattccgatgacaccgccgccgacgatcatcatggattggggcagacgttcaagctcaagcgcttcatctgatgtcagaatataagtaccgtctgcttctaaacccggcagcattttcggccttgaaccggttgcgataatcaattgtttcggtatcagcatgtcgttttcttcaccatttgcgtattcgacggaaaccgtaccgggaagaggtgagaagatggaagggccgagcatacgtccgtacccgttgaatacatcaatcttcccctttttcatcaagtgggcgacaccgccggccagccggtcaacgattccctgctttcgtttttgcacgctgtcaaagcggagggagacaccttccgtttcaatgccgaatgctgccgcttcctttgcggttcggtacacttccgcgcttcttaacagcgccttactcgggatacatcctttatgcaggcatgttccgccgagcttttctttttctacaacggccgtttttaagccgagctgggccgctctgatggcggctacataaccgcccgtgccgccacccagaatgaccacatcatactcagtcgccatttgttttcactccttcgccgatctgatattgctttgactgctcctcaccggctaaaacccgaagcgcgccttgcgcgagagattgcagttcattttctcccgggtacaccagtacatccgaaatccaatctatgtacgatctgatggcggatacgaaacttttcccgtacgccaagccgcccgtcaggacgataatgtctacttttccttttaaaacggcgcttgccgccccgatttcttttgctacttgataagccattgcgtcataaatgagacgcgcgttttcatctccggcctgaatgcgtttttccaccttcaccgcgtccgttgttcccaggtagccggagagtccgcccgtgccgacaagttttttcatcatatcggcttttgaatacttgccggaaaaacacatttccaccaaatcacccgccggaacggttcccgcgcgctccgggctgaagggtccttctccgtgaagcccgttgttgacatccgtcacccgtccgcaatcatggacaccgactgtggtgccgccgcccatatgagtgacgatcatcttcatctgttcataccgtttgccgagggacgccgccgcctgacgggcaacagctttttggttcaaagcatggaaaatgcttttccgcttgatttcaggcattcctgatactttagcgagcggagtcatctcatccaccacgaccggatcgacgatatacgcggggatatttaatccgtcagctatttccctggcaataattccgcccagattagatgcatgctggccgttgtagccgtttttcaaatcagtgatcatggcgtcattcacttcatatgtgccgccctcaatcggtctgagcaggccgcctctggcacaaacggcatcgaactttgaaatgttgatgccctgttcgtgcaaagactcaagaatgcttatttttcgaaattcgtattggtcgatgatggtgttaaatgttttcagctcttcttcgggatgccgcagcgtcttttcaaagatacagcgttcattgtgaaagacaccgattttcgttgatgttgagcctggattcagaatgagaatgcgtttttccttttcgaacattttcatacctccagatcaaattcctatcgtctgcttaatatactttggccgttttgcagaaactggcttcttgaacggcgcatgcgctcaattcgttcctcagccagacggtcagccgctaagtatgtcggaatgccgtcacgcgcggaaatatcgagcacccgctcaatgtttgcatagatgccttcaacctttttcaaagcccgctcagcattgtagccgtaaagctcatcggccacattgatgacgccgcctgcattgatgacataatccggagcgtacacgattcccatttcatgaatggtatcgccgtgacgtgtttctttcagctggttattggccgctcccgcaatgactttcgccttcagctgtttaatcgtgtcatcgttaatgacggcgccgagagcacatggggcataaatatcgcacgcctgtgagtaaatgtcgtcgggatcaactgcgcgggcgccgaagtcctcaacggcacgtttaacagattctttattgatatccgttacgattaaagaagcaccttcttcgtgaaggtggcggcatagattgtaagccacatttcccacgccttgcacggcaattgttttaccttccagtgaatcagtgccaaacgccgctttcgctgcggctttcatccctttgtagacgccgtatgccgtaaccggggacggatttcctgatgaaccgaatgccggagaaattccggttacatagtctgtttcatcatgaatgatgtccatatcttcaacggttgtgccgacgtcttccgccgtaatataccttccgtttaagccttggatgtagcgcccgaacgcgcggaacatttcttcatttttatctttgcgcgggtctccgataataacggttttcccgccgcctaagtttaaaccggcagccgcatttttataagtcatgccttttgcgagtcttagtgcatcttcaatcgccgcttcttcactgtcatatgtccacattcttgttccgccgagtgctgggccgagcgtcgtatcatgaatcgcgatgatcgcttttaatccggattgttcatcttggcagaataccaattgttcgtaatcataagtctccatatatttaaaaatttccataggttcgttcctcctactgttcttgtgatgcgcaaatcgcaagcgcaattgaatacagtttattttctgcggtatccgctctgctcgttaatgcgatcggcgcttttgcaccggcgatgacggcagcaacatttgctttcgcaaaataaatcattgacttataaagcatatttccggcctcgattgaaggaaccaagagaatatccgcctggcccgctacgcttccggaaatccctttttgcagcgcagccgcttgggatacggcattatccaaagctagcggtccgtccgcaatgcagccggtaatctgccctctgttgcacatctggacgatcgcagccgcgttcagggtcgcctccattttcggattaaccgtttcaatagcggcaaggactgctgctttcggcataggattccctactgaatgtgcgacatgaaccgcattttgcagaatatgcccgagctcttcaagagacggggcaatgttcagcgctgaatcagtcacatacatcagccggtcatagtccggcacctcaaaaacggctacatgtgacaacaccctttttgaacgaagcccttcatggcggtttaaaaccgatttcagaagagttgagctcgggagattccctttcattaaaacgtccgcctcttgttcacgcactgcgcgcactgcttttgccgcagattcttcgggtgaatcggcgtggatgatttcagcattgaacttcggctcatttgccagaagctctttcagctttccgctgtcacccgtcagtaaaaatcgtgccgacaagtgttctgccgccattttgacggcctggatcacttctttatctgctgcgtgggccactgcaatggtttttgcgttttttgccgcggctttttcaactaggtctctcagcttcattttgtaccaccttccttgtgcgaatccgcttttaacaatgcaagttccgtgccaaatatgcgggagggtttattccggcttttttcaagaaaacatgcagctgtttgcgctttctctgcaatttattgcatgccgtcatttgcaaggccgtacttgtccattttgtagtacaggttccgaatgctgacaccaagcgcttttgccgttttggttcggttgaatttatgcttttcaagcgttttttgaatgacgtgcgcttcaaatttttcaacagcctgagacagcttttccccttccacatccggaaaatcactttgggtgccgtttttttcattcagctctgattcaaaaacaggcagatgctgctgttcgatccgttccatgtgcggctctaaaaatatcattgcccgtccgagaacattttcaagctcccggacgtttcccggccagctgtaggctgataaagctcgcagcgcgttcggcgtgagcccctttacattgcggccgtaatcctgattgattttttcaatgagccgaatgctcagcgcttcaatatcttctttgcgctgccgaagcggcgggattgagatcggatagcggttaatccggtaatacaggtcttcacggaacgcgccttccgccatggccttttcgatattgacgtttgtcgctgcgataattctgacattgacagaaatcgctttagcgccgccgactctgataatttctttttcctgcagaactctgagcagctttgcctgggtgctttgggtcagctctccaatttcatctaagaaaatgctgccgttattcgcttcctcaaaaagtccttttttgcctccgcgcctcgcgcccgtaaacgcgccttcctcatagccgaaaagctcggattctagcagggattcagacagggccgcacaattgacccgaatgaacttattgtattttcggtcgctttcattatggatggcgtgggcgaaaagttcttttcctgtgccggattctccccgcaacagaatcgtcgccggcgttttcgccccgagcttcgcctgttcaagggcgaccagcatttgttcactcgtgccgataatgtcatcaaacgtgtatttcgcttcaagcgtgcggatgatctggcgcgcccgattcagctcagcagtcagcgttttaatttctgacacatcgtgaatgacgccgacgctgccttttaaaataccgtccacaataacgggggcaacatttacgatgacatcctttttattggggccgaccttcatcctcacaccccgcacgggccgccttgtccccaatactttcagatgcatgctttccccttctgagatatcggtggaagcgggttttccgatgacttcgctttctgacagcccggtcatttttgtatacgctttgttgattaacattccgatgccgttttcatcaacgacagaaatggcctcgtctgatgattgtataatcgcttcaagcatggtgcggatttgttttaagttcgtgacctcttccgccagttcaactgcgtcggtgatgtctttaaacacgcataacgcgccgagaagttttccgccttcatcaatgatcggcagtcttgtcgtgacaatctgcaggtgctttccgagaagctgcttctggttatattccggctctctcgtttccagaatccgcggcagctttgtgttcggcactacatctttaatttggcggccgatgacatcctcccgtttttggccgaccattttttctgccatctgattaaataaaatgatcgtttcgttgacgtctataaaaatcatgccgtcgtgcgttgaattaaaaatccggtcatgcttatacgtctgcgacttcagcatttggataagctgctgtttttcctccatcagctgaaacaccatgtacgccaattttcccggcatgacgatggtttgttcttttttttcttggagcagctcatccatgaccgctttatcgcctgttgtatggatgataatatctatatcttcagttatgtagggtttccaatctgatgaggttgcaattccatatttccgggcttcttgcagcccttgcgcctccggatcttgatcaaccaccgcaataatccggatcagctttgttttcatcaaaatctgtaggagcgccgtgcctcctttaccagcacctataatcagcaccttctgcatcccgatacccctttatatgaaaaaatttgcacacctgtatttcccgttgcaataatttgcacaacccctatgttaccacgttttgatctcttgacaaaatattttttcgattggacaataaaggaaaacatatcgtaaaggggttttctgaatatgagccggcttgttgcgcttttgattctggtcctccccggcgctgtcgcggcgctcggcattaagctgatgagagatgcattgttcgggcatgcgttttccccgtttccgtccctttttcttcagggggcggccggattggcgttttttttgttcggcctttatgttctggccgggtttattctgtacagagatcggaaacgcaatcaagtcagcccgcggttcaggaaaaaaaagctgtaaaaaagcccttgcaaaaaaagggctttttcagtcgtccggcagtattgttttggcaatggattgatccagttcttcatagtcatcgtaagcgatcgtttcatataattcttttctcgtctgcatatccgaaagcccctctttttgcgagccttcttctttcagaaggcggaaaatacgctcaaaagccttggccgccgttctgagtgacgtgaccgggtaaatgaccatctgacagcccatatcggaaaattcatcagcactgtaatacggcgtttttccgaattcagtcatgtttgcgagaatcggcacactgatttgtttggaaaacgctctgaattcactttcggattggagcgcttccggaaaaacagcgtcagcacccgcttttatataatcggacgccctttttaatgccccctccagtccttcctgctgtctggcgtctgttctcgcaacaacaagaagagtcggcgcggcccgcttgaccgcttggattttttgcgtcatttcttcaatcggcacgagctgcttcccattcagatgtccgcattttttcggcaggcgttgatcctccatctggacggcggccgcgcgcgcttcatacatttctttcgccgtccgggcggcattcagcactcctccgaaacccgtgtcaatatcgacaaggacgggcagatcagacgagcggaccagatctttaacccgttcagccatttccgccgacgtgatgatccctaaatcgggcagccctctgctcgccgtgtaagccgcgcctgataaataaagagccgaaaaccccgttttcttggcgataagagcggccatcgcatcatgggcgccggggatctgcagtagatccggcgctgtcatcagcgtacggaaccgctctgcaagctcctcttgagacgactgctcgctgacgatccacgtcatgtttgtcaccctcctattttatacgagaaataagtccataaattcactaacgctgagcttctgcattcggcctctatgttcgcaggcctcttcgatttttcgctgctgcttcaacgaaaaatgagtgctgatgtttgctgaaaacttggcaagaattttcggaacggcttcttttctgcggaaccggtgcccgagcgggtattcacattcaatccgtcccgtagccgtgccgtctgtaaaatgcacctgtacggcatttgatatggatcgcttattcgggtctaagtaatcttttgagtacgctttgtgttccgtcacctccattttgctccgcaatgtatcaattcgcgggtcagacgccgtttcctcttcataatgatccgccgtgatatctccgaaaagcagcccgattgccgtaatgtactggaggcagtgatcccggtcagccggattgtgaagcggcccttttttatcgataatccggattgccgactcatgcgtcataatcgtgatcctgtcaatgtcttcgatgcggtctttcacctccggatgaagccggaccgcgcattccgctgctgtctgcgcatggaattcagccgggtaggatactttaaacagaacattctccatcacataggacccaagcgggcgggcaagctttatttcctgccggttaaacaatacgtcttgaaatccccacccagatgcggtcagagccgtcgggtaccccatttcacctttgtgcgccataagggccaaatatacccctctgctcgtcgcatcgccggccgcccatgatttgcgtgatccggtattcggcgcatgacggtacgttctgaggcttgaattatcaatccaggcatgagatacggcgttattgatttcctcttttgagccgcccagcatttgcgcgcaaacagccgcagtcgccactttcacaaacagcacatggtcaagccccactctgtttaagctgttttccaaagcgagaatcccttgaatttcgtgcgctttgatcattgcgcaaagcacatcgcgcacgataagcggttctttcccttctgaaatccgcactctggatatataatccgcacaagccaatatgcctccgagattgtcagacggatgaccccattccgccgcaagccacgtatcattataatcaagccacctgttgatacagccgatattaaaagcagccgtgaccgggtctaaaacaaaaggcgtgcccgggactctgctgccgttgggcacggaggttcccgggacaatcgggccgagcagctttgtacattcgggatagctgagcgccaaaattccgcagcctatcgtatcaagaagcacatgtcctgccgtagcgaaagcttctgaactgtcaatctcctgatggagcacgtagtccgaaatctcttcgattacagcgtccattcggcggggttctgtcatgttttcatcttcctttctcatctgtttataggcgcgctccggtatagcggacacgcgggcggaaaagccggtttcggctgtgctgttcaatgacgtgggcacacaggccgaccgtgcgtgcgctgaagaatataggcgtgtacagcggtatcgggatgccgagcatgtaatagaccggcgctgcgtagtaatctaaattcggataaaggccttttttctccctcatgacggtttcgccggcttcacacatatgataaagacggaaatcacctgaaagatcagacagcttttttaacgcttctttcatcatgagcgccctcgggtccatttttttcatgtagacacggtggccgaagcccatgattttttctttgtttgcgagttttcgagttaataattgtgtaaacccatctgtatccttcgcttcttcaagcatgtacataaccgcttcgttcgcgccgccgtgaaggtttcctttaagcgaggcgacggctccggtcagcgcgccgtaaatatccgattgcgtcgaagcaatgacacgggccgtaaacgttgaattcggcaattcatgctcactgtataaaagaagcgacctgtcgaagatttcttcttccaaagatgacggcgtttttccggtaatcatatataaaaagtttgcgctgtatgataaggttccgaccggcgccaaaggctccagcccgttgatgactcgatagctgttgaccgtcagattcggcattttgcctatcagtccgcgtacacggtgctgatttacggaagatgaacggtcatcgatgtccttgtcaaagcctccaagcgcggacaaacccgtcctcagtccgtccatcgggtgagtatgttcgggcagcagacggcatatgtgcaagatttcctcgggaaggtgtccgccgcgccgaacgtcttcttcaagcgccgccttctctttcgcatcaggaagtctgtcttccaataagagatgaacaatgtccatatagccggccgttttagaaagctcaatcagatcgtggcctttgattaaaatactgccctgctgtgtatccaggaaagaaatccccgtttccaccgcaatgacgccatctaaaccgggagaataagattccatggtttcgctcctttgcgcactttttattgaagaagatacttagaaataatcagcctttgaatctcattggttccttcataaatttgcgtgactttcgcatcccgaaataaacgctccgcgggatactctttcatatagccgtaaccgccgtgaatctgcacagcctccaccgccgctttcatcgccgcatcggacgcaaattgcttcgccatagatgcttcttttccgcacggaagccctcgctgatacagatcagcagcatgatagaccaataatttggcagcttccgcattcgtcgccatgtcagataatttaaatgaaacggcctgattcgaagcgatgggtctgccgaactggctgcgggttttggcgtactccaccgagcagccgagcgccgcttcgataatcccgagcgcctgagccgctatgccgatccgtccgacttcaaggtttttcatggcgattgaaaagccttcgccctcttcgccgagccggttttcaatcggaatttccgcttggtcaaactgcaaatcgacagtattggaacctaacaatccgagctttttttctttttttccgatagaaaaaccgggtgtgtttttttcaacgataaacgctgaaatcccctttctccccttacccggatcggttatggcgaatgtcagatacaaatctgccgctccgccgttagtaataaagatttttgaaccgttcagaatatatgaaccgcctttttgtacggctcttgttttcaggcttcccgcatcagatccggattgaggctcagtaagcgcaaatgccccaatatattcgcccgctgccagcttcggaatatacgcttgtttttgggcttctgtcccgaaatgcaaaatcgggattgtccctaccgatgtgtggacggacaaaatgacgccgacggccgcgctgacttttgatatttcatgaatcgctaaaatgtaagatgttgtatcagcacccgccccgccgtaagtttccgggacgggaatgcccatcaatcccgcttcgcccatttttttaatcagccgctccggaaattcatctgttgattccatgagctcaaccaccggcgcgatttccttgcgggcaaaatcacgcaccatttttctcatcatgatgtgctcttctgtaaaatgcatagctgccgtctcccctcatgatctttacgtcatctgccgtactcataaaaaccgcgcccgctttttttgccgagccagccggcgctgacatattttctgagcagagggcatgggcggtatttcggatctccgagccccgcatagagaacctccataatggaaaggcacgtatccagcccgatgaagtcagctaatgttaaaggacccatcgggtgccgcatgccgagcttcatcaccgcatcaatcgcttcctttgaagctgctccttcgtaaaggcaataaacggcttcgttaatcatcggcattaatatgcgattagatataaagcccgggaagtcattgacttcgacaggggttttattcatccggacggcaagctgctttactgtttccgccgtttcttccgatgtggcgagtcctctgatgacttcgacaagctccatgacaggaaccggattcataaaatgcatgccgattactttttcaggcctttttgtggccgcggcaagctctgtaatgggaagagaagacgtattgcttgccaatacggcatgagggggacagattttatctagtgtgtcaaacaattctgcttttgcttttttgttttcggcaatggcttcaattataaaatcagcatcttccgcttctctgagttctgccggggaaatacggctgaaaacggcatctgtctcctgctgtgacttccgtccttttgcctgctctttctccaggtttgtctttatgcgatgaagaccttttgttaccgtttccggctcccaatcgtataacttgacggcaaacccggcttctgcagccgtctgcgcgatgcctgctcccatctgacccgcacctgcgaccatgattgttttcatcttcatccggcgctccctcctttgatcagtacacctcaagcaggacggcatctccttgagccgctccgctgcatatagcagctacgcctaaaccccctccgcgacgctttaattcgtatattaaactcatgatgattctcgctccgcttgcgccgatcgggtggccgaacgcgattgcccctccgttcacattcactttttcccggctgaacccggctattttttcactcaccagcacgacggacgcaaatgcttcatttacttcaaacaaatcaatatcgtcaacggacagtccggtttttgtcaagagccggctgatggcctctcccggcgcgcttgccagctcggacgcttccagtccgactgacgcaaagccaagtatcgctgcgagcggcctgacatgctgctttgcggctttttcctctgacatcagcacaaatgctccggccccgtcatttacaccgggagcgtttccggctgtaaccgttccgtcggctgtaaaaattggcttgagcgctgcaagctgctcaaggctcgtatcagggcgcagcccctcatccgcttcaacggtatgctgtttgccctttttgccggtccaggtgacgggaacaatttcttcatgcaatttgcccgcttcagccgcctctgccgcgcgtttctggctcaaaagagcgtaatgatcctgttcatcccgggaaatgccgtactttttggccgcagtgcttccgtggacagccatatggacctggtcgaacgcacaggtcagcccgtcatgaaccattaaatcctgaaacaccccgtcccccatcctcacaccccagcggccggccggaatggcgtacggaatgttgctcatgctttccattccgcctgcaatcagcacgtccgcatctttcgcccgaatcatttgatcacagatggtaacggccctgagccctgatgcacagaccttattaatggtttcagccggaacggaccacggaagcccggcatatcttgcagcctgccgtgccggaatctgcccggcacccgcctggacgaccattcccatcaccgctccttccgcttcgctttcactgatagcggcgcgcttgattgcttcttttatggcaatgccgccaagctcggctgcctttacctcttttaatgcgccgccgaattttccgaacggcgttcttgccgcactgacgataaccgtttttcccacaattttgcctcactttcaataagataaaagataacgcttacacaaaacgccctgttacaatatatgaaccggctgaccgagttatgagtgcaccgcctttttcccgcccataaaaaaagaagactgtctgaacagtcttctcagctgcggcattcttcttttatagaaacagccagctttggataatcggtaaaaattgcgtctgctcccgctttcatcagctgcttcatatcctcaggacgattgacggtgaacggacggagcgccgcttggtgttttgcaagatgtttgatcacttcagcgctgaccgccggcgtaccgagcttcggatgataacccgaagcgggaatggctgcaagataccgttcaggccggtacagtacatccattgtcagcaccgcccgttcaatttcaggtgccagggcgtggcaaaccgcgagactctcatgattaaatgaagaaaaaataacgcgcttttccagtccgtaatatctgacttttttaatcacttcttcttccattccttcgtaacggaatacactgtttttcagctcaatgtttatcagaaaatcagcacgttccgcaaaacgcagcacatctgacaaaagcggaatcctgactcctttaaaagaatctttccattttccggcggcatcggcggttctgattttgtcatacgccgtatctttcacaaatcctttcaaagacgttgtgcggtcgagggtttcatcgtgaatgaccacgatccggccgtcttttgtcatctgtacatcaagttcgattccgtcagccccgtcctcaatcgcttttttgaatgcgggcatcgtattttcagggcagtcgcccgacgccccccggtgggcaaaaatattcgtcatatgtgtcacctcaggtgtttgtcatcggttttctctattataatcgttatgcacataaggagggcgctatttacacatattttataattaccggccgctgtaataggtttcgattccgtttacaacggcgtctgcggcgtgctcttggccgttatcgcttttcagcttgtccgcatcttgaggatttgtgataaaacctaattcagcaagcacactcggcatctttgaatatgtaatgacataaaaaggagcttcttttacgcctctgtccctcatccctaaagacgtgacaagctgctgctggatgtcggaagcaagcctttcgctgtctgctccttcatatgtcgaattaaaatacgtttccgtgcccgatgccgttgagacggctgaattcgtatggaggctgacgaataaatcggattggctggcgcttgctttcgccacccgctcgtccaaacgtaaaaaagtatcgtcagtccttgaagctacaggttttgcgccttctgtctccaatttagcaatcaccttgtttgacaccgctaaattgatgtttttctcaagcagtccatttcccccggccccgctgtcttctccgccatgtccggcatcgatataaatggttttcccttgcaaaggttcagctgcataagcagacggcgcaagcagaagcagagcggcaccgaaggcagcagcgctttttgtcagtaaacccacgttttttcctccccgttttcacatatctgtttcttttttcagttcctcaagccgtaattgtccgttgctctcttttttataggtgatttgcaccgccgtatgttcaggcagagactgacattcaaaccgcttagcgaacggcaccttcacctcttgcctttctccgtcaatttcgaccgcgatcgtatcgtttccggccgcttttataaatgttccttcctgtgtaaatgacggcgccgcatcagcctccgcggtatactcgcagcctgataacagccatgcggtgaagatcagaagtatgacagacttcacacagatcacctcacgttttctcattcggctttatctttgaacagaatggccgatttgtaaagggagccttcattcctccagcgcttttccatatttggaatgaaggctatctgacctgctgtttacctgaacttagaaagaaaacaagctgatcagtctatgaaaaaggttctgtctgaaggccgaatatgcagaatttaacggaaacggacgactttctgttcattttgaaaaaatatcagatcggcaaaaaaaagagagccgcgtcatgcgctctcccgaatagaaacattcatatttattttgagcttttcataaaatgaacgggacaacttaaaagagcagcgtattggcggcaatgatgagaataatcactccgctcagcaccgtgctgaactgtccgacgtgaaaagaaccgatgcgcaatgatgcggctttttttccaagcgagcagccgatccatatcgtcaaaaagcttccgaccgccgcagtaatggaaatggcagcgggagaaagcccgatcaaacccgcgcttaatccgttggtcagcgcatttgcggatacggccaccccgagaaccatggattccaatataccgatttctcccgaaccgtcggcatccgctgcctccggattttgcagcagaccggcaaaacggcctttttttcctgacgcgccaacacgcgctgtttttctcggcacagccagcagaatgatgcggataccgatgacagataaaataaacgccgccagcaatacaggaagaaagcccggtaaaacggctgaaatccatttgccgaaataaattccgatataactgaatacaaaacagataaaagcgatcatcatattcgacgcatgcgatattttgatttttctgatgccgtatgacatccccactcctaaattatcaatgctcgaggacactgccaaacctaaaatcaataaccaagccatgttcgtttctctccattctttgatgtcttttcaacatgttgtgccgttgaatctacactatcctattcagcagcacagaaaaggtaccttttctgcaaaaattattgattaatgatcatcattccggcggaaacgaggtgacacccttgacagaaaataaaaataaaacactggggccccttttaaaatcactgcttgataagcactcgctctccatgagaaaactcggcgccttaacaaacattgatacggccaccatctcccggattataaacggcaagcagaaggccaatttaaagcatcttcaggaattttcaaaacatctccgcaccccgctggaggaattgcttgaggcgtcaggcatagacatcggccatgaaaaagaagctgcgccgcaagacccgatgcacgcgattcaggatatgctgaatatggccgagatgtttgatcagcctttttcccgggagcaaattgagcgcgaactgaccagatatgaacaatatgccaaaacccagcagggccatcgcctgatttgcgatgagtttcaaaagaaaatggacaatgaagaaagcgtcggcccttttattgatcatttgaaaaacatgcatcatcagtatatggatgaatcaacaccggctgaagaccgcgcgattctcgggagcgcgcttctgtattatattttagcgaccgacgtcattccggattacatgtttccgatcggctacctggatgacgccatcgccgttcaaatcgctttgaaccggctgaaaaaaaaataaaggcgcttaaaaaagcgccctttttgtgttgaaaaatatgaaacaccgcattacggttttgtcaaaacagagacagctgtcatatgatacatcaacctaacaaaaaggagggtgtcttctatggacagcaacacagttgtggcagtgtgcgctctgttaagtgttgtgattcagatcggaacgatattcgccgcaggaaagtggaaaaaagaataaataaaaacaaattgacggttttttcgcacaggcgtatgcttataaataaccttgtaaaagataagaaagaagatatgtatatgaaaaaaatcattctcctcttcgccgccgctgtcatattcagctcgatcggccatcaaatttcaggaggatataaagatcctgaaaaggaacggagaaaaccgtttcattcgtttaaatggttcagccggtcataacctcaggaagaagaacaagcaaaataattgcacacaattaaaacataagctagaatacggacgagttaaactcctaaggaagaaggcgaaatgatgaagcaaacttataaaccgctgtttgaaccttttacgttcgaaagcggcgtcaccataccaaaccgtatttcagtcgcgccgatgacacactattcatcaaatgatgacggaacgatttccgaccgtgaattaagctacattactccccgttcaaaagaaatgggcatggtcattacggcatgtgcaaacgtaacgccggacggcaaagcgtttccaggccagcccggcatctatgatgattctcacattcccggcttgaaaaaactcgctcaggcgatccagtctcaaggagcgaaagccgttgtgcagattcaccacggaggattagaatgccctcctgaactcgtgccaaacaacgacgtcgtcagtccgagcggctcagaagaagacgggagacaaacgtcccgggctctcaccgaacaagaaattgagcacatcgtgaaagcattcggcgaagcgacacgcagagcgattgaagccggctttgacggtgttgaaattcacggggcaaacgggtacctgattcaccaattttattcaccgaaaacaaaccggcgcacagaccgctggggcggaagcgatgaaaagcgccttgcgttcccgcttgcagtcgttgacgctgtcaaacgagcaattgatacacacgctgaaaatccattcgttctcggctaccgcctgtcaccggaagagccggaaacaccggggcttacaatgaaagaaacattcatgctcgccgacgcgcttgcagaagagaacttggattatctgcatatttcactgatggatgtcaattccaaagcccgccgcggagcggatacttcacggacccggatggatttattaaacgaacgcgtcggccataaagtgccgctgatggccgtcggttccatctataccgcggaggaagcgcttgctgtattagaaagcggaattccgctggtggctctgggacgtgtcattttgattaaccccgaatgggcggtgctggtcaaagaaggccgcgaacaggaaatcgaaaaagccattcaagcatctgaaattgagaaataccgacttcctgaaccgttatgggaaatgatccagaatacaggcggctgggtgccgtttgaaaagtagactaaaaaaactgccggatgtccggcagtttttttgattcacaagtttttaccgctttgtttactcctatttcttacacacagcgtacatatagtaaatagattaatagaaaggagaccgtatatgatggctggttttcctattacgattaacagtctttccggaaacggggttgtcaatgtcggcggtgcgttttcgataagtcctttaaccgtatcaaaaaccgtctacggctcaggtgggggaaatacagggatggtcctgcaaatgaatcaatccagtacctctcaatcttcaagctctcaatactctgatcaaaatgtaacgaaaacactatgacatctccattcccctccctttccggctggcagcagccggattctttttgccgttttgtttaatcttattccatattacagcgtacatatagttagtagactgtgagagaaaggagaaaaaatagaatgagcggttgcccgattacgataaacaacgtatcaggaaacggagttgtcaatgttggcggcgccatatccatcagtccgctgactgcatcaaaaaccgttttcggtgccggagggggaaatatcggcattgtcattcaaaacaatgctgtgagccacaccaaaatgtttgaacatcaattttcagatcagaatattgtaaagtcaatttaagggctgccatgcagccctttcagcataaataaagcaggcgcactgatttcctgaaaccttgatctttaaacatcagcgatcaccttcccttgttttgaatgatttcagttcaaggtgaatagaatgcagattgaaagcatgagtactgaaactcattaaggaaagaaggaatcgtgatgaaaaaactttgccgggaagtttggattgaagttgaccttgatgcgataaaaaagaacgtacgggcgatccgccgccatattccgaatacgtctaaaattatggccgtcgtaaaagcgaacgcttatggccacggctctgtggaagtagcgcggcaggcactggaaagcggggcgagcgagctcgctgtcgcaagtgtcgaagagggaattgtgttacggagagcgggaattacggcacctattcttgtgctcggcttcacagctctcagctgtgtgaaaaaatctgccgtttggaacataacattatcagcgtttcaggtcagctggatcaaaaaagcgaatcggatattggaaaaagaagcagattcgaaacggctgtccattcatatcaatgtggataccggaatgggccggctgggtgtgcgtacggaagaagatcttttagcagtggtgaaagcgctcaagtcgagtacatacctgtcatgggatggcatctttacacatttttcaacagcggatgaaccggacactgagctgacgatgctgcagcacgaaaagtttatcagctttctcagctttttaaaaaatcaagacattacgctgcctaccgtgcatatgtgcaatacagccgccgctatcgcattcccggaattcagcgccgacatgatccgtttaggtattggtttatatggtttatatccgtccgcctcgataaaggaactgaacctcgtggatctcacacccgcactaagtttaaaggcgcgtatcgcttatgtgaaagccatggtgacagatccccggaccgtcagttatggtgccacatatatcgccgaaccgggtgaaatcatcgcgacgattccgatcggctatgctgacggttactcccgcgccctgtccaaccgcgggtttattctgcaccgcggcagacgggtgccggtggcggggagagtgacaatggatatgatcatggtcagtttaggtgagaatgagggcaaacaaggagaagaagtcgtcatctacggtaaacaacaaggagccgagatttccgttgatgaaattgccgaaatgctcggtacgatcagctacgaagtcttatctgtattaagccgccgcgtcccccgcttttatttcagagacggcaaaatcattaaaatatcagctccggtattatacgtgtagacggcatagatcccgcatttatgtatagaacaagtaaaggcgtgagtgatttccattgttttcgtcagcaaaatttcaaaacgccttctcttccgcgttcatgcacggaatagaaggcgcgaaaaagacatctagccaaaagcttgcgttacgaagctttatgctccaatctcagcttgtcagcaaccatcgcgatgaattccgagttggttggttttgcttttgtcatgcttaccgtatatccgaacagtgaagaaatggaatcaatatttcccctgctccatgcgacttcaatggcgtggcggatggcccgttctacacggcttgcggtcgtgttgaattttttggcaatgtcgggataaaggacttttgtgatgctgccgaggagttcaatgtcgttatacaccatggaaatggcttcacgcaaataaagatagcctttgatatgggcaggcacaccgatctcatggataatgcttgtaatgctggcatcgagatttttccgctttggctccggctggctgcggataatgctgctttgcgcggacggcgcacggtgtgtgacactgctgacatttccgcttacctggcggatatggccgacaaggttttccatatcaaacggcttcaggatgaaataggacgcgcctaaatcgacggcttttttcgtaacgtcttcctgaccgaatgccgtcagcatgatgacgttcggctgcttctcgagctctgattcccgcagacgctccaaaaccgcaagtccgtccagatgcggcatgataatgtctaaaacgagcacatcgggattcttatctttaaacaacgaaagacattcctgtccgttataagcaacgccgatcacttccatatcatcctgtccctctatatattcactcaacaggcttacaagctctcgattatcatcagcaacacaaactttaattttctccacgtttcttcctcccccaatgtattaacaggacgcaacccatttgactgctatatgttacattcgacaaaaccactacttccccttttaaaaaatccatatttaccaataatagtggtatatctttgtttttctagcattttctaggtttttcgactaaaaattaagtttgacaaatcaggaaacgtgaatttgtcgaaaaatcttcatgtcttattttacatgaatcccggaaagaagtgaagaacgcatcacataaaaaaactgccggatcatccggcagtcagcttgctttatctttcccgtaaacatcaacacccgcttcagacagcatccattcgatatgaacgccgtagccgcttgtcggatcattgacaaatacgtgggttacggctccgacgacctttccgttctggatgatcgggcttccgctcatcccctgaacgattccgccggttcttttcagcagtttcgggtctgtcactttcaacaccattccctttgtcgctgggaatttttgcggcgtggtgctgacgatttcaatatcaaatttctctactttatcgttttcaataaccgtcagcatttgcgccggtcctttttttacttcatttgacaaagcaatcggaagcgctttgtcggaaatgttgtttttaatcggctgatgcagtgtcccgaaaatgccgaacgggctgttgcggttaatatcgccgatcgttttccgttctgacgaaaaccttgccagtttttcgccgggattgccgccttttcctttttcaatcgatgttacagttgaacggacgatttctccgtcttctacaacaatcggtttttttgtatccatatcagagatgacgtggcccaatgcgccgtatttttttgttttcggttcaaaaaatgtcatggtgccgatgccggctgccgaatcgcggatataaaggccgattcgatatttcccctcggcttcgtcctttgtcggaatcagctttgttttgattttttgcttatcgcgtttcaccaataaatccaaagattcaccggttttgcccgctttttgaataaacggagcgatgtcgctcattttttcaattttatgtccgttcattttaataatgatgtcgccagattcaattcccgcttgttctcccggagactttttcccatcctttgtcatcacctggtgaaaaccgacgaccaaaacaccgactgaatgcagttttacaccgatggactgtccgcccggaatgaccttcaattctggaaggacacgcacttttgtttttttaatgggaaacccggcaagatcatatactacttctgaccggccttgtgtttgccctgttatgtttgcatggccgtgctcttctttcagcgtaaaggcttctgataattcgcccttttcagcgcttattgatgcattgaccggaacggcctgtgtctggttttcaaagacgctcatttctgacggtatcagtaaatattctttaaatggcttaaaaaagcctacacttagtaaagaaacaaggagaattacacctattgctttcctcatgttatcgtgcattcattccttcactctcctcgctcctatcccacaccactttctttttctgctacatctatacttttgccttcctgcgcttgatttataaccggcatacgaagaaaaacattggatacactgttagagaaatggaacaaaaaaataagctgcctgtatcagcagcttatcctgtcgtttttacctgtccggcctgttttagaagctcttgtgcatgccgttttgtcagatcggtcacttcaacgcccgcaatcatgcggccgatttccgctaccttgtcctgtttggaaagcggcgtgacatgcgttgtcgtccggccgtctttgaattcttttgcgatcagaaggtgtgtatccgccatggcggcaacctgcggcaggtgtgtaatgcagagcacctgtgaaccggtcgatactttatggattttttccgcgatggcttgggcaacccgcccgcttacaccggtgtccacttcgtcaaagatgatggaggtgacatcctgctgggaagaaaaaatactcttcatcgccagcatcacccttgaaagctcgcctccggaagcgacctttgacagcggttttaaaggctcaccggtgtttgttgaaattaaaaacttcacaaggtcaatccccttttgggtaagctgcacaggctgcccgttaacaaccggtgcttcactggctgacggatcggttttcacgagaaattccgtatcaaacgttgatttgcccatatacagactttttaattcctgatgaatcgcttccgccagttttttagcccaagcttttctgatttttgataaattggcggcttctacggccacatctttgccgaccgactccaattccttcttcagcgcttcaaggtggctgtcgcggttctcgatttgatcgatttcctcttctattttggagccgtattccaaaatgtcttctaccgtcgctccgtatttgcgcttcagctgtttgatctcatttaaacgggtttcaataaaattcagccgttccgggtcatattccagatcatctaacagattgcgcatctgaaaggttgcatcctccagcagataataggaacttgacacactttctgacagcttttgcagcggttcattgatatccgaaatatcttcaagctgggcagaggccattccgacccagtcaagccccccctgctcgctgcggagcgcattataggcgttttgcaatgattcataaattttttcaaagttggatatctgcttccgctcttcctgaagaagttcgtcttcattcaattcaagcttcgccgactcgatttcttcaagctgaaattgaatcaggtctaaccgatgcgccatttcctgctcgctttctgacagcttcttcacttttttgagcagcttcatataacgctcatagccttcatggtaagcctgaagcgcggattcggcctcagcgcccgcaaacctgtccaaaagctccaagtgtttatcgtcctccattaacagctggttatcatgctgtccgtgaatatctaataaaagtctgccgatttcccttaaagccgcaatcgtcactaattttccgttgacacggcagacgctttttcctccggcattgatgtcccttctcatgacaatcatgtcatcagatgcgtctattccctgctcacggcatacatcaaaaacgggatgaccgctgtccaaaagaaacagtccttcaagctcggcctttgtttcaccgtaacggacaaattcagacgagccgcggccgccgactaatagggaaacggcgtctataataattgacttgccggcccctgtttctcccgtcaggacggtgagcccccgttcaaacgaaatcgtcagttcctctataatggcaaagttttttattgatagttcagctaacaaacagcattccaccttttatctgataattacgctacagcagctccaaaagacggctttgaacgccttccgtatcttcaggcgtcctgcagatgattaagatcgtgtcatctccgcagatcgtgcccatgatttcttcccattcgagattatccatcagagcgccgattgcctgagcattccccggcatcgtttttaatacgatcatatggcttgctgagtcaatttttacgaacgcatccattaatgaacgcttcagttttgacagcggattgaaccgctgatccgccggcaggctgtatttgtaggagccgttgttcgtcggcacctttacgagatgcagctctttaatgtctctggagacagtcgcctgggttaccttatatccttcttctctcagcatgtcaactaagtcatcctgcgtttcaatctcatggcttgtaataagctctctgatttttatatgcctttggccttttgtcatgtaagcacctctgttttcaagctgttcttgtcattatgttaaccgcttcttgataaaaagtacatgatggcagaaaaaaggaataatagccccctattattccggtacatctgtctttttggcttttaatgtttcatgtgcttcgcggacggtacggagaatgtcttcttccggcagttcagcgccgtttccgtcttctccgccccattccaaatgaagcagaaactcaatattgccgtctccccctgtaatcggtgagaaggacagtcctttcactgtatatccttcagaagcggcaaattgattcatgcggcggagaacgtcagtatgaacgccgggatctctgacaatgcctttttttccgacggattcccgtccggcttcaaattgcggctttaccagtgcaatacaatcgctccccggtacaagcagcgtttttaaaaccggcagaatgaggcggagtgagatgaaagaaacatcgattgtcgcaaattccggcaaaccctctgtgaaatcggaaggctcggaatagcggaaattcgtccgttccatgacgacgaccctctcgtcctgtctgagcttccaagcaagctgattatagccgacatccactgcgtaggaccgctcggctccgttttggagggcgcaatccgtgaatccccctgtagacgagccgatgtcaatcatcgttttgccttttaccgagacaggaaacacttccaaggctttttcaagctttaatccgcctctgctgacgtatttaagagggtttccttttaccgttaacggaagatcccgggcgattttttcacccggtttgtccaatcggttttcatttgagtatacgatgcccgccataatggcgcgtttcgctttttcccgcgtttccgcaaggcctttttctacaagaagtacatctaatcgttctttttttgctgtcatgatccaattcctttatgtgtcttcgggggcatcagcagttttatccggttcataacctcagccttcgtgagaccgatttcttcaagcagggcggttacgctgccgtgctcaataaaccggtctgggatgcccattctgtcaatcggtgtatgatacatgccgaggtcatgagcgaattcgagaatcgtgctgccgaatccgccttcaagcacggcttcttctatcgttaaaatcggcagaccttcattaagaatggccttcatcatttgttgatcaatcggttttatgaaccgcgcattcacgacacgcacagacaggccttctttttgcagttcttcagccgcttccagcgccatttcaatggtcgtaccgaatgttaaaatgaccgcgtcttttccgggacggagcacttcccatgttccgatcggaatggttttcagctctttatccatctttacgccgagtccgtttccgcgcgggaagcgcatcgcaatcggaccttcctcgtaggaaagggctgtattgaccatatggcggccttcattttcatccttcggcatcattaaaacgaggttcggtatatgccgcaaaaaggcgatgtcaaaaacgccttgatgcgtctccccgtcagcgccgaccaaaccggcgcggtcaatgccgataaatacattcgcgttttgacggcagatgtcatggacgacctgatcgtacgcccgctgcaaaaaggtcgaataaatcgcaagaaacggcttcatgccttggagcgccattccagccgccattgtcgccgcatgctgttctgcgattccgacatcaaacatgcgttcagggaattctttcgcaaacccttccagtttggagccgaccggcatggccggtgtaatggcgacaattctgtcatcctcacgcgccagctcctgcacggtgccgctgacaagtccgctccatgaaggcgccgcggctttcggcttgacgaaatcacccgtattgattttgtacggccccgttccgtgccatgtgccgattgtgtcggtctcagccggtttatagcctttgccctttttcgtaatgacatgtaaaaggacagggcctttcgtttttttggcgtattgcaggttttcaaacagttcgtggtaagaatgaccgtcaaccgggcctaaatacgtaaagcccagctcttcaaaaaacatgcctgacacaagcatatatttcaaactgtcttttatccgttccgctgtggcggccaattttccgccgacggccgggatgcgcttaaataaatattcaagctcgtcttttacccattgatatttgccggccgtgcgaagccgtcccagcatagaatgaatcgccccgacgttcggcgcaatgctcatctcattatcattcaggatgacgatcatgtcttttttctcatcaccgatatggttcagcgcttcaagcgccattcctccggttaaagcgccgtctccgataatcgggatgatatattctttcgatcctttaatatcacgggcggcagccattcccatcgcgcctgagagcgaggttgagctgtggcctgtttcccatacgtcatgttcgctttcgctgcgtttcgggaaaccgcaaagccctttatattggcgcaaggtctcaaactccttgccgcgtccggttaacagtttatgaacataggactgatgtccgacatcccataaaaatttatctttcggactgtcaaattctttgtgaagcgcaattgtcagctcgacaaccccgaggttcggcccgatatggccgccagaagcagacagcgatgtgatgaggaaattgcggatctcctcactcagctcttccagctgttcaattgacatctttttaagaaatgacgggtcctgtattgataaaagatccaaagcggatcaactcactttcagcatgaatttctgcaaattaaacagtgtctttttgaaaaaagaaaaagactccctttgtattttcatcgaaactgcttacattttaccataggagcagcagccccttcaaatcaggaccgtttttaatgatctctcgccgcgattaaatcacagaggtcatgcagcaattctttctgaagggaaaggccgctgatgatctgtttcgcctcgctgatatgatacgcaagcttttctttcgcgccttcaagcgttaaaagcgacggatacgttgacttttcattcgtcgtgtctgagccgaccggtttgccgatcttctcctcatgaccttcaatatcaaggatgtcgtctctgatttgaaacccgatgccgatatggctgctgaacaaacggagcttttctacttcatcctccggcgcatctgccaaaatggcgcccgccgtcacggaaaaaccgaggagcttggccgttttccgctcgtggatggattccagctcctcaagcgttatccgcttttgttccgcttccatgtcggcagcctgcccgccgaccattccttccgttcccgccgcactgatcagctcatcgacgagacggagccgtttttctgctgaaaccgcctcagacacgtgggatgtgatcaatttaaagctttctgtcagaagcccgtctccggccaatacggctgccgcttctccgaagactttatggtttgtgggctttccccggcgcagatcatcatcgtccatgcaaggcagatcatcatggattaaagaatacgtatgaatcatttcgacagcgcatccgaccggaatcccgtccttttcatcttttccgtaagcattcagaacggctaagacgacgagggggcgcagcctcttaccgcccgcttccaaagaatacagcatagattttttgagggtttccggcatcgcaagccgttctgtatacaaagaaagctgctgttcaatcagttgtttgcgcgatgctaaaaatgcgtccagtttatttgtcaccttcgtcttcctcctgaacgctgaaaggtgcaagttctccgttatcttttaaaataaagtccatttgcttttcgacatgctgaagcttttcatggcacatttttgaaagggccatcccttcctgaaaataattaatcgcctgctccagcggcacgtctccttcttcaagctttgccacaatgccttcaaggcctttcatcgcctcttcaaatgtcagctcttcactttttttggtttctgtcattttcgttcgcctctcttttgcaatacttcacacgtcagaacgccgtctgtcatctttacttctagcgtatcattttgttccacttgatcaacgcttttgatcagctctttgtctttataggccagactgtatcctctctccatcacctgaaggggacttaatgcattcagtttaccaagaaccgtctgaaactgcgaatgaagctgcttcagctggacattcatgcttcgggcgagctgatttgagcgctcctcgtaccgttttttcgcctgtttcagctgggtttcagggtggagcgccgttaatctgtacgtatttcgctccagctgcctttgtttcatgtccgtaagccctgtgagctgtgattggaactgctgatacaaaaggtcaaactgctgttccttttgggtgtacaatcgtttcggaaaacggaacgcgtaggatgactggagcgattgaatccgttcttttttcttgctgatatgctgctgcatcgctcttgtcaggcggacttccgccgtttttgtccgttccattaagtccgtcgtgtgggggacggcgatttctgccgctcctgtcggcgttgccgcccggatatccgcgacgaaatcactgattgtaaaatctgtttcatgtccgacggctgatataatcggaatggcggaagcaaaaatcgcccgggccacgatttcttcgttaaatgcccacaattcttcgatcgagccccctccccttccgacgatcaggacgtcacacattttttgtgcattggcttcttcaatgcgcttcacaatcgatctgctggcattttcaccttgaacgagcgcgggaagcacaatgactttcacaagggggtatcttcttttgagtgtggtaataacgtctctgacggctgctcccgtcggtgacgtgacgaccccgatcgtggccggaaaagcggggatggcctgcttatgccggtcatcgaacaacccttcgccggcaagttttttctttaattcttcatatgctaagtagagcgcccccacaccgtccggctgcatttctttcgcgtacagctgatagcttccgctcggttcatagacggagatgccgcctcttacgatgaccttcatcccgtcttcgggcttaaacgcaagcctcgaactttgcctctgaaacatgacggcctgcatgcgggcatgctcatcttttaatgtaaaataaatgtggcctctcgtatggattttaacattggagagctcacccttaatccaaatgtcttcaagatgagggtccacatcgaattttcgtttaatgtatttggtcagcgcggaaaccgtgacatatgccgcttcactcacatcctgcactcctttcataaaggctttttgccctaaactaagaaaacccgctctggctgaaaggagccttaagaagcgggtatcgtgctcattgtcacactttttgtgactgtctccggttatctatgataacgtacgtctggcagatttaacagtattatgcgcaagcattgtgatggtcatcggacctactccgcccggcaccggcgtaatgaaagatgctttttctttcgcttcatcaaactgaacgtctccgcagagttttccgttttcgagacggttgacgccgacatcaatgacaatggcgccctctttgatttgatcggctttgatgaagttcgctttaccgaccgctaccacaagaatatctgcttttttcgtatgctcagacatatttttcgtgcgggaatggcaatatgtgacggtcgcgttttcgttcagcagcagctggccgaccggtttaccgacaatattgcttcgtccgactacaacaacttctttgccggaaagatctacgttcgtctttttcaataactcgacaattccgtgcggcgtgcatggaagaaatgtatcttcgccaagcagcattttcccgacgttgagagggtggaaaccgtcaacatccttatcaggggagatccgctcgattacggctttttcagaaatatgatccgggagcggcagctggacgagaatgccgtggaattccggattttgattatactgatcaatcactgttaaaagctccgcctcggttaagcttgagtcaaagcggtcaagcttaaatttcattcccattgtttcagcggcttttttcttgcctgtcacatatgaaacagaagcgggatcgtctccgattaaaatgaccgccaagccaggcactacgccttgtgctttcagctcttctacttcttttgccaattgttcgcgtttttctttagccgtttcttttccgtcgatgattgttgcagtcattttctttcctcctatgattcgatatcagttttaatgttagaaagaaccccgtttacgaattttgcagctttatcgtcgccgaaccgttttgccagctcgatcgcttcgtttaatgacacgttagcaggaatgtcgtcagaataaaccatttcatacaccgccagacgcaggatcgcgcggtctacgtttgcaatccggtcaagcttccaattgacgagatggccggaaatcatttcatcaagctgaacctgatgttcgatcactccgtacaccagctgttcaaagaaggcatctgttttttcaccatcaagcgcgtgctcaatggcatcgttcggtgcaatatcgctgacatcaatctgaaaaagtgcctgcaaagctttttctctagctgttcttcttttcattttctttctccttcagatccgctttatccgcttgtcgttaagcttaaagagatcataacatatttttttctcaatcgcatgtcgaaatttaggttttttcaccctaatgccgaatattttcacaaactgtattaatttcattcggatttcacagcatgaagaaactcggctgccgtttgtaagccggctttcttcatgcctgaaatgacgggaaacgtataaaaaaccaaagggctgcccatccccttggtttttatacgctcattacatttcttcgtcgatttcgacttcttgggctttcgtgtcaaattgaatgccgacgatatgaatattgatttcattaatggtcagagacgtcatgtttaataaggtttggcggatattctcctgaacgcttgccgccactttcgggatcgagatcccgaattgaacgacgcaatagacgtctatggtaatcccgtcatcggctaaatcgacctttacgcctttgccgtgattgattttgccgaagcgttctacgacgcccgtggcgaaattgccgcgcatttcagcaactccttcaacttcggaagcggcgatgccggcaatgacttcaatgacctcaggagcaatttcaaccttgcctaaatgagcctcatcatgatccattttaagcacactgttgtcttccattcaattcacctcccgcaaaaattatgagcccattacatcatatgtttctaaaaactttgtattaaactctccgctgacaaatgtttcgtgttcaagcagtttcaaatggaacgggatcgtcgtttcaataccttcaatcacgaattcgctcagcgcgcgtttcatccgtgcgactgcctcatcacgcgttgttccgtatgtgatgactttagcaatcatactgtcatagtacggcgggatcgagtagccgggatatgcggctgaatccacgcgtacaccgagtccgcccggcggcaggtacatgttaattttaccgggtgaaggcatgaagtttttcgcaggattttcagcgttgatgcggcattcaatcgcccagccgttaaattcaacgtcttcctgtctgagcgaaagctcctgtccggatgccactttgatctgttctttgatcagatccgttcccgtcaccatttctgtgacagggtgctctacttgaatacgcgtgttcatttccatgaagtagtagcgctgttctctgtagtcataaatgaattctactgtgccggctcccgtgtaaccgacggccttcgctgcttttaccgctgcttcacccatctgctccctgatttcagaatcaagcgcaggtgacggtgactcttcaagaagtttttgcagacgtctttggatagaacagtcacgctctccgagatggatcgtgtttccgtaattatccgcaagcacctgaatttcaacatggcggaaatcttctatgtacttctcgatgtacacacccggatttccgaatgccgtagcggcttcctgctgggtaatctcaatgcctttgatcagttcttcttctgtgcgtgcgacccggatgccttttccgcctccgcccgcagtggcttttataatgacaggatacccaatttcacctgcaagcgaaaccgcttcttccgtattttttatgattccttttgaaccgggcacaatcggcacgcccgccagctgcatcgtgtcgcgcgcgatatcttttgttcccatttttgaaatggcgtcagccgtagggccgacaaacgttacgtttaattcctcgcacagctcggcaaagtcggcgttttcagctaaaaacccgtatcccggatgaatcgcatccgtgccggtcagctttgcgacgctgacgatgttcgttacatttaaatagctctctttcgatgttttcggcccgatacaaaaagcctcatcggccatttggacatgcagggcgtctttatctgcctcagaataaacggctacagtttcaatgcccatctctttgcaggcccggatgattctgacggcgatttctcctcggttggcgatcaatagctttttaatcataatagcaggtctccttactcagcttttacaagaaatagaggttgtccgtattcgaccagctggccgttttcaactaacacttcaacgatttctccttttacttcggcttcaatctcgttaaagagtttcattgcttctacgatacaaacaactgtattttcgctcacttttgaaccttggtttacgtaagggccggcttccggcgatgaagaagcataaaacgttccgaccatcggagacgtaattttgtgcaggttttcgtcttgtttcggcgcttcctgagcaggagcggcttcacgcgcttccggttttgcagcctgcggagcaggtgcgtaagcggcgggaacggcttgggcttgtcccgttacattcactgccggcgcttcattttttttcagtttgaggcttacgccttcaatttcgtaaacaaattcgtcgatggaagattcatcgattctttttatcagttcatgaatttcgttgatttttaacatcagtttccactcctatgtataaaaaatagaaatttatgggttgctactaaaagtacatactatgtttatcttacaggagcgcttgtgtaaattcaacactgatctaaaatgacatcagaaaagcccgcagcgggtgcgggcttttcaggtctcttactttgtcggttcaaacgtgacggcgacgtctttcatcgtcttgatttctttttccaccaggtcaatgatagcggaagcttttgcgtttgaatgtttgtcagacatgacagtaatgttgattttgtctccttcagcatccacgagcgcatctttgtagccttgtgttttaatcagcgtttccagctgtttttccgtcccctcagcattgctcagcgccgtcattttatcgtaggcttcgcttttttcctttgcggtcgcatcatcgcttgaaacaatgctgtttaactgttccctctctttgcttctcgcgtcttcaagttccatacggtatgcggtaaataagttttcatcagctgtttctgtggcgaccgatccgtctttgtccgatgcttcggctgatgtttctttatcctcttttgtgcctttagaatctttcgttccttttgttccgtcttctttttccgtaccgcttccgctcttatctttcgtttcaggagccggcgttttttcagtggcgacttctccgctgcttttttcgcttttcatctgcacggcatttttgctttccggcgacataatataataaacacttaataccacgacgagactgagcattgttaaaagccaaaccgtttgttttttcagcatgatttatgaatcctccttgatttttttaggggcaaccgctacacggtagctcggaacatcaagcacccttgtgacggcatcaatgatggttttttttatttgaacgttgtccactccctgagcgacaacgagtacaccgcggatatcgggctttttcgtctggacgacgaccggggtttcctggtccccgtttcgaatcatgacaatttgttcttcagaggtttgatcggttacgcttcttttgccgccttctttatcggtttcttcagtggtggtgtcttttttcgttttgtttttctcaaacactttcaaagatgttgcgtctacgtttacgacaattgagacatcctccacgccgataatcgtttcaaggatttctttcagctggttttcatagtttctttcgtaatcatcaattgtggttttggcgctgctgtctttcgatgccttaaaaacgggtgcgcttttttgcccgcttttgtcttccgttcggccggacatgacggtctgcgccgtttggtccttcccggttttctccggtgaagagaacagctggctgaccagcataaaagataccccgagcacaaacacgaacagaaagtaatgatattttgtcagttttggtttttctccgtctttcgcctgtccgatcatcagctgttttttgagtatggtccatagtccgtttttattcatggccgtttttctccccgccttccatataaaccgtaattttctcactgccgatttcccatatatccgcaagtttttctttgatgtctgcggcctcttttttgtcggctgcgccttccggttcgtatttgcggtctgtgcggatgtcgatcggtgcgacggtttgcacggttttttcagaagatggggccatatacacgctgatcgtttttacatcttcttctgaacgaacctgttcttccgctgcaaggcggatgtcgtctattttgtattcgtcatgactgaacatctcctccgctttcttttttagttggacagccatttcttctaaaacatatgcgcggtttgatgcttgtatttcttttttttctgatttgatttgattttttatatcagcggattgagattgctcttgttttgtcaaataatcgaagatgatttccgggtctgttttgaaaagtttgaatatcgggttgagcatgacaatgattaacagcaggctgacaaccatctttgcgtatttttgcatactggagctgggcagcagcatgtcgatgacgatggcgaataagataaataaaataatgcttgtcagccattctgttaaaaagctcatatccaatgggcctcctttatttcatcatcatggtgaggttgcctgctgtaataatgactgtgatgctgaggaaaaacatgagagagacaatggcgagcgccgcgaaaatatacagtacgcttctgctgatgacaccgagacacgtaatgacgggcccgcctccgagcggctgcaaaatagcggccgcgagcttataaataaaagcgagcgagagcactttgatcgccggaaacgcggagatgcagatcaaaattccgactccgaggattcccacagtgttttttaataggagcgaggcgctgatgaccgtatccgtcgcatccgtaaacatccggccgagcacgggaataaaattgcctgttataaattttgcagtcctgagcgtaatcccgtccgtcacggcagccgaagccccctgtacggagatgacgccgagaaacacggtgaggaatacggcaagcgcgccgatcgcgatatttctgagcagattggcaagctgcgtgactttatattgatccgtcatcgtgctgacgatacttaaaatcgctgacaggaagataagcggcatgacgatgttttgaatgagaaggccgctcgtattcatcagaaataaaataacggggtgaaaaaaagctgcggagacggctcccccggaagacgccaaaagcgcaagtaaaagcgggatgagcgcgagaatgaagcttgtcatcgtctggatcgcttcactggcataattaacggcaacatgaaagctgtttaaagcgagaataatcagcaccatgtagacgattgcataagccactttgctgacggtgctctgctggaacgcattttgcaggagctgcagaatgacacaaaaaatggtaagaagaatcaaagttcccagaagctttccgtttgcgagcacttcatgaaacaagtatgaaaataaagccttcagccatgcctccggtgagaacgttttttcaccgttaataaagtcgatgatgcttcccttttggctttcaggcagaagaccgccgtattctgtcatgatgtcgtcccaaaactttccgatgccttctgttttcagcgcttcggcctgctttttcgccacttcatcagcggattcttggtgaactgcggtttcctgcgacgcaccgtctgttccggcagcttgtacacattcagtctgaaaaaataagaggatgaacaaaaaagctcccgcccaccgaaagcgcttcattttttgtgcccccctttccattttatttatgatcatgaaggaataagtccgagaatcgtttcaataatgacggtgagtatcggcacggccattaccagtatcaaaatttttccggccagctctattttcgaagcaatcgctccctggcccgcatcctttgtaagctgcgctccgaattcagcgatgtaggcgatgccgataatttttaaaatggtttccacatagaccatattgacatttgcattgacggctattttttctatcattctgataatgtcgtaaatctggtcgatgagataaagaaagatcacgcagccgctgaagacgacaatcataaacgcgaaagtcggtttctgttcttttacgatcagggagagaaatgtggcgatcaggcctaaacctacaatttgaacaatctcaatctgtaagcccccctatccttggaatagaaacacagctttgatctttttgaacaggtcatcgacaatcgtcgccaccataaataaaatatagataaagccaagcagcgtcacccactgggcgtattctttttttcccatttgatcaagtatggtgtgcagaaacgcaaccacgataccgactccggcgatttgaaaaatgacatttacgtcgactcccattttatgtttgctcccctcatgtttacatcaatagaagaatgagtaacagtccggctaaaaatcctaagcttttcaccattttttcatttttcgcctgcgcccgtccggcatccgcttccgccgcttccaaatgtgtaagcgcaagcttgatatgtttctgctgagaaacacggtcatggagcccgagcgtctctccgaattgcttcagcacatcatattcgctttttttcatcgccatggaaggccagttatgtttcaagctctgttcccaagccgttttggcggaatcacttccctgctcaagccttctgctgaaagcttgaaacagtaacgatacaggtttggaaagctgtgcggcaatttgtcccgaggcggtatgcagcggtgtatgcccgaacatgatttccgcttcaagcgattggagcgccgcgcgcagctggcggatctgcctcggcctttcaatatacattttggcgatctcaaatcccgtccaagtcgtcgctgtcagaataaacacggcacccaaaagcttcagcatgtcatcacgctttcagcatgcggaacaggttccccgtcctttccgtacatcctgctgatcgttcccggaccgcggcgccttgacagttcaacataccggtcaaacacgttttcctcccaaagcattttcagcgacggcctctttaccaagtctttcatattccacccgtgcgcagatacgataacggatacgcccgcatggagcgcctccagcagcgcttgtgagtcttccattctcccgatttcatccacaattatgacatcaggactcatagagcgaatcatcatcatcagcccttccgccttcggacaagcatcaaggacatcgattctgcggccgaaactgtgctggggaatgccccgcaggcagccggcaatttccgaccgttcatctacgatacctgtctttttcgccgggatgcgttttgatccggtgctggaaagccgggccaaatcacgaagcaaggtcgttttccccgtttgcggaggcccgatgatcagcgtgttcagccagttttctttccataagaaaggaatgagcggttctgcgatccccagcttctcccgggcgattcggatattaaaagaagtaatatcccggagtcctttgacggctccgttttcgacgatgactcttccggccagccccacacggtggcctcctctgattgtgatgtatccttttttcagctcttcttccagcgtgtacatactgtaattgctgagccggctgaggatcagctgtgcgtcgccggccgtgcacacatatgacaaatacaaaggttgtccttttcggatcagttcaaccggcctgtcgacgcggattctgatttcttctgtatcccgcctcgcttcttcgggcacggcggagatggcatctctcaataattcagggagaacctctgtaatttcattcaatagagtctcctccttttttaccgattggcttctttaaaatgtatgatccgggacagactttatgacaccccggccctctatttatgcacaccggctaaaatcagcaccactcccgcaaaaatcaatattaattttgcatatgagagctgtccggcaatctgataaatgccgatcgtcatcgtgatgataaagatcagcgggccgacgattgccaaaatactattcaccacaaccgcttttctgatgtcgtttgtcaaaagcatgataatagcggccgataattcaatgagcgaggacaaaactcgtaaaccggccatcgttaaaacagtagaattgattgaaccaaacaaaaatttcattgcaatcccccaacttcaagcattttgttacactatatgctctagctgacggaagtagtctcactattttcatatagaagaaagattctgaggcagaacgcaaaaaaagcctgccccgtaaaaggagcagactccgaaagtctttgactacgctcttgacacgtaagagccgtctgatgtatttacaactagcgtatcgccttcgttcacgaagaacggtacgtttacgacaagacctgtttccgttttggcaggttttgtgccgcctgacgccgtgtcgcctttaattcccggctcagtttcaacaactttcagttcaactgtgttcggcagttcaataccgagcgtttcagactgatacatcatgatgtgcacagacatattttccagaagatattttaattcttcttcgatttggttttcgttcaattcaagctgttcatatgagcttgtatccatgaacacgtgctgatcgccgttggcataaagatactgcatcgtttttgtttcgatttgcgctttcgcgactttttcacctgcacggaatgttttctcctgaatagcgcccgtgcgcaggttacgcaatttagaacggacaaatgccgctccttttcccggctttacgtgctggaagtcaacgacgcgccaaatgccgccgtctacttcaatcgttagtcctgtacgaaaatcgttaactgaaatcatgtttgatgtcctcctatattccgatcacaaaataattaattcttttggggaatgcgtaattgtccggttgccgtcctcagtgatgatgatatcatcttcgattcttgcgcccccaacatccggtatgtatatgcccggctcgaccgttaccgccatgcccggctcaagaacggccgatgacctgaaagacagccccggtgattcatggacttccattccgaacccgtgtcctgtcgaatggccgaaatactgtccgtagccttttgcggtgatgtgatccctcgtcagggcgtccgcttcttttcccgtcatgccgggtttaatatgcaggacaccaagcgcttgggcatcgtatacgacctgataaatctctttcagtttatcacttggctctccgaccgcgacggtgcgtgtgatatcagaacaatagcctttataataagcgccgaaatcgagcgtgaccaagtctcccttttcaatcaatttgccgcttgccactccgtggggaaggctggatctgactcccgaggcgacgatcatatcaaaggaagagccgtctgctccttgacgtctcatataaaattcaagctcgtttgcaactgaaatctctgagatgcctggtttgataaacgtcagaatatgttcaaacgcatcatccgcaatcttcgcagcttcctctaatatcttaatctcttcacttgacttaatcaagcgcaacttttcaacggaatccgcgacgggaaccatctccgcttcctgcagcacagcttggtaggatgcatatgttccgtacgtcatgctgttttgctcgaagccgagttttttaatgccgtactcaagaatcgtatccgcagccgtttggattaagcttccgccgtgctcgataatgtcaaaacccttcacttgcgtcttcgcctgctcggtgtaacggaaatccgtgataaatgccgcacgttctttcgatatgaccgcaaggcctgacgaacccgtaaatcccgtcatatactgcagattggcggagcttgtcaccaatattccgtctatatccagctgaccgaaaagatttcgcaatttctcaagtttcattccctttctcctcctcgccgattcttgactgccgcctgacaacgcgggagcatccccgctcggttttcagcataaaaaatgttcacttctcgtgaacattttaccataccggacagggattatacacttattcacttgttgccaagcgcccttgcaagcttgtctgacgtaagttcattgtagttgaaggaaattgagtagccgacaaacaaaccgtacagaatgtaaaggcaaagcgtcgtcacgattgtatctgatttcaattcagtgacggatttcacatcttcgaaaatcggattgaataagaaaaaaaccgcacaccataaaatgatgccgtacaccattcccggccacatggttttaaaacgcttcaggcacacgaaataaatgaacgctccggcaattgaaatcaacccgatgacaacgatgctgaccatcgtgccgacccattgttttttccattctccgatcataaacggctggagaatcatgttggggctgatctctgaaaaatgaaagacatacccgagatagccgatcaaactccaaaatacaccgccggcaaatccgataccgcaaattctgccggtaaatgaaacaggctgctgatcatcatcctgcttctttttttcttcctgttctgaatgtttttcgcttgtcatcatggcacctccagtcatagactgccccaaaattgaaaagtcataaaaagctgcgccatattttcattcaatgagtaaattctaaaaaaacggggtatactgcatgtagaaaaagcattgattttccggctgtctaactagaggtttaccgcagtttcctgtacaatagagtgaaaggaaatggttagtaaatcctaagaaaacaggcaggttgataaacaatgtccaaacaaaaaacgccccctgcatacggcgggcaggctgtcgttgaaggagtcatgttcggcggcagaaaaaattatgttaccgccatccgcaggaatgacggaagcattgattttttcaagcttccgagagtgccgaacgccaagctttcggctttaaaaaagattccttttttgcggggaatcgtcgccatcattgaggcgagcgccaacggcacaaagcatttaaacttttccagcgaacgttacgggcttgatcctcaagatgacgccaagctggagcaggaagataagaaaggttcgggcttatcgatgtttttcagcctggcggtgatcggcgttctgtcgtttttgttcagtaaattcgttttcacgctcgtcccggtcttcttagcggagcttgtaaggcccgtattttcctcagacgccgcgcagatcggaatcgaaagtctgtttaagctgattctgcttctcggctacatttattttttatcaatgacgccgttaattaaaagagtgtttcaatatcatggagccgaacataaggtcataaactgttatgaacagaatttgccaattacaatagaaaatgttcagaaacagtcacggcttcattaccgttgcggttcaagctttattttatttacgatcattgtcggcatgttcgtctatttactcgttccgacagatccgctttgggtgcggattttagacaggattgcgcttatacctgtcgttctcggcatctcctttgaagtgctccagctgacgaacagagtgcggaatatccccgttttgaaagtgctcggttatcccggcctgtggctgcagcttttaacgacaaaggaaccggcggatgaccaggtcgaggttgccatagaaagctttaacgagcttctcagactggaagacatttcagaacagagcgaaaagccgtctcacaacgtaatctgaaccgttaccgttattattttggaggtgggcagttatgaatcatcgtgtacaacctttttttgctgtattaatagcgcttggcgcattcggtttcatttatgcggcggtaaccaaccccgggcagatgatttcaagagcgatcaccgttattatcgcaggcatcattatttattttatcgtgaggacggtcctgaaccgccgcaccggccgtgacggaaccgctttcagaaaagcggccagacaatcgcggctccgaatgaaggagcaaaaagcgaagcaccgcgccggacacagaggccgggtcagccatttgcggagcgtgccgagcagcagcagaccgaagccgatgattcttaagaaaaaaagccagacccagcttaccgtcatagaaggtaaaaagaataaaaagaaaaacagagcgcttttttaatagctccattgcttcaaaaattgctctgttctgctttttcctagctcaatgagagctagttttttttgcggtgtgagatgaaactccgtcgccatcacatgttccaccggaataaaaataatattctgttcgtactttgtcgcgatatgcctggcatcatgagcgtctttcatcgtttcaaacaaagccccgaacagctcaaaagcgttgcggattgattttttcgggcgctctttttcgttgggcgaaagcgaaattccgataaccggccgtttgcgttcttttgaatacagccaaatcgggaaattgcttaacacgccgccgtcaacgaccgtcgaggtgcctttttcggtcttcagttttatcggttcaaaaaaataaggaatactgcagctcattctgacggctctggcaaccgggaacatctccggatttaatccgtagcggggaagatcgtcaggaagcacgatcatcgttccgttcgtcagatctgaagcgatgagacggagcgagccttttttcaaatcgccgaacgcgatgatgcccttcgcttttaatttatccgcaatccatttttccagcatatcgcctctgtatagtccgaggcgccaatatatcgacacccaccgcaggattttcagcgggaggaatgagtatctctgatcaagcaattgccttccgtccacctcatctatgatggaatgaacctctctgctcgtatagcccgcagcgataaatgcggcaataattgcgccggcgcttgttccggcgagcctttcaaagcgaaagcccttttcttccagcgcttcataagcgccggcaagcgccaccccttttatccccccgcccgaaaatacgccgtcaatctgcatagcgcgccctctcccttccatctcaaggtgtattattattttaagaaacggctgggcgaaatagaccaaagaatgaagacattaaaaaaagggcgccccatttcgggctgccctttattcaccgggattttcggtttttttctgtacggatttcaattcttttttccggctttcgtcatcttcaaaatactgaacgaggtcgccgatgcggtcaatgctgttccagctcagatgatgttcgattccttcaacatcattgtaaatcttctcttcatcaacaccaatgattcttaaaaactgctcaagcaattcgtgtctgtatacgagccgtttgccgatctttttgccttttgacgtcaatacgagcccgcgatatttttcataaatcaaatactcgtctttatctagtttttgaaccattttcgttacagaggaggggtggactgccaaagcttccgcaatatcagaaacccgtgcatatcctttttcttctatcagcatataaatctgttcaatataatcttccatacttggtgttgtcataagtaaccctcccaaaaagcaccttaactttataaaccattacaagtttacactaacggtcatgaaaaaacaaggatgcttccggtctgtcaagccttatcagcgcttataattccattcatcagacgcgtatttcgtctcagccagctcattgacaaatgcaagctcctcagacgtgagtgtgtaaggctcaagatgaatgttcagcccttcctcaaaaccggctttaaaagcgattctggcctcatccatcgttacccgtttcggcgctaaggcgttgatggctaccgctttgtttttgaaattccgctgcatgcgctcacggactctgtcgctcggatataaaaacagatcaaacagcttatcctcatcaatgtcaagcaggatggaaccgtgctgaagaatgacgcctttttggcgtgtctgtgcgcttccggcaactttccgtccttcgacgaccagttcataccacgaaggcgcatcaaagcagacggacgagcgcggatttttcaagctttctttttctttctccgttcgcggaatcgcaaagcaggcatcaagtccaaggtttctgaatccctgcagaataccttctgaaatcacccggtacgcctctgtcaccgtggccggcatttccgggtgatcctctgaaacgattacgctgtatgtcaattctttatcatgcagaacaccccgtccgcctgtcggtcttctgacaaacccgaggccgtgtttatgtactgcgtcaaagttaatttccttcttaatattttgaaaatacccgacagacaaagttgccggattccagccgtaaaaacggatcaccggaggaatttttttttggctgtgccaatataaaagcgcttcatccagcgccatgttaaatgccgggctttcattccctgagtcaataaaccgccatgtttctttttccatacactgaacccttctttatcgttttaataaaatcagtttaacaaactgcattgaaaatgaaaaatatttcgtttcattaaggatgacaatcgcttcatgctttactataatagtatttgtcccaaaacgtccggtaagccttgttttcaggaagcagggttttattttataagctaaaggagtagaatcgcattgtctaatatgattgctttaattattgttgcggcgtttatcgtttatatgatcgtgtcgtatttttaccagcagcgtttaatgaaaacacttacggaagaggaattccgcgcgggctacagaaaagcgcagctgattgacgtccgtgaaccgaatgaatttgaaggcggccatattctcggcgcgcgcaacattccgctgtcacagctgaaacagcgcaaaagtgaaatccgtcctgataaacccgtttatctgtactgccaaaacaatgtccgcagcggacgcgcggcacagacgctccgcaaacacggctgtaaagacatttacaacctgaaaggcggatttaaaaaatggggcggaaaaattaaagcaaaaaactaatcataaaaaagagctgtccgttttatacggaagctctttttttacaccgtgtcagcggctgacgcgaggtgtatgttcgtactttaaaaccggctttcttgccgccttggtttcatccattcttttgacaactgttgtatgcggcgcctcctgaacgatttcaggcgattcctccgcttcccgcgcaatttgaaccatggcatctataaacgcatcaagcgtttcctttgattccgtttccgtcggttcgatcatgatgctttcttcaacattgagaggaaaatacacagtcggcggatgatagccgaaatccaaaagccgtttggcaatatcaagcgttcgtacgccaagctttttctgccttcttcccgataacacaaattcatgcttgcaatgacggtcatacgggagatcataataaggcgcgagtcttctcatcatataatttgcatttaaaaccgcgttttcggtcacggcttttaagccgtcaggccccatggaacggatatacgtgtaggctctgacattaatgccgaagttgccgtaataaggttttacgcgcccgatcgactgcggccggtcatagtcaaaagtcaaacggccctcttttttcgtgagaacgggtttcggcagatacggaatgaattcttttttcactccgaccggccctgagccaggtcctcccccgccgtgcggcccggtaaatgttttatgcagattaaggtgaacgacgtcaaatcccatatctcccggtcttgctttacttaaaacggcatttaaattcgctccgtcataataaagctttccgccggcctgatggacgatttcagccatttccgtaatgttttcctcaaataacccgagggtgttcggattcgtcagcatcagcgccgctgtttcttcatttaccgctcttttcaaatcttcaatgtcaaccagcccgtgctcatttgacttgacggtaatcgtttcaaaaccggcgaccgtggcggatgccggattcgtgccgtgggctgaatcagggacaatcaccttcgtccgtccgaagtctccccgcgcttcgtgataggcgcggatcatcatcaggccggtccattcgccgtgagcgcccgccgcaggctgcagcgtcacctcgtccatgcccgtaatctcctccaagtgtccgcttaaatcgtataaaagctcaagcgccccctgaacagtatcctcgtcctgaagcggatgaatcgcggaaaaacctgcgatccgggcgattttttcatttaatttcggattgtatttcatcgtacaggagccgagcggataaaagcctgaatcaactccgtggtttctcctagaaagagcggtataatgccgcataatatcaagctctgatacttccggcagctttgcgtcttcatcgcggatatagccaccgggaagaaggctttcaagctctgtttccggcacatcaagctccggaaggctgtaaccgacacgcccttcgcgggacatttcaaaaataagcgcctgatcttgattattcatgttgatcccccaatcccgcaataagcgaatcgatctcttcttttgttctcagctctgtgacggcaatgagcatatgctgattcagttccggatacgcaaggcctaagtcatatccgccgatgatgccgtcttgcaggagccgccggtttgcttccttgacgggaagattcagcctgacggcaaattcattaaatatcgggccatcaaatgctacgtgtaagccggctttttccgcttggcgtctcgcgtaatcagctttcaatatattttggcgggccatgtctttgacgccgttttttccgagcgccgtcatcgcgactgaagccgctaaagcattcagcgcctgatttgaacaaatgttagacgtggctttgtctcttctgatatgctgctcgcgcgcctgaagagtgagaacaaaacctcttcgcccgttttcatcctccgtttggccgacaagccggcccggcacctttctcatcagttttttcgttactgcaaaatagccgcagtgcgggccgccgaacgccgcaggtatgccgaaaggctgcgcgtccccgacgacgatatcagctccgtatgccccgggcggtctcaaaataccgagcgcgagcgggtttgaagaaacaatcagctggctgtttcctttatgtgcaagcggctcaatgtcctttaacggctcgatttgtccgaagaagttcggatattggacgatcacggcggccgtttcatcacaaatggcatgttccaatgcttcaagatctgtgacgccgtttttcgcaggcacctctacaacctcaatatattggccctttgcgtatgttttcaaaacatcccgcgattccggatgaacggctgcggaaatgacgatttttttctttttcgtatggcccgacgcaagcatcgccgcttccgccagcgccgttcccccgtcgtacatagaggagtttgcgatatccattcccgttaattcacagatcatcgtttgaaattcaaaaatcgcctgcagctctccttgtgagatttcaggctggtaaggtgtatatgccgtgtaaaactctgatcgggatatcacatgatcgacgataaccggctggtagtgatcgtacactcctgcgcccagaaaagatgcatatgtaacagcgtctttatttttcgccgcaagcttcgtcagctctctcgtcagctcagtttctgactttgcttgtttaatgcggtagtctttttgaaaccgtacattttccggaatatcggcaaacagttcatcaattgtttctgcgccgatggctttcagcatttcttttttatcctgttctgtcgcgggcaaatatcgatgcttcatatgactctcctttttcagctctgttttggacgtttataaaacggtgtgcggacaatcttcgcttttaccgtttttttacggatttccacttctacttccgttccgacttcactgaattccgttttgattaaggcaaggccgatatttttctttaaagtcggagattgcgtgcctgtcgtgacttcaccgatcggaacaccgtcttttttcacggcgtacccgtgtctcggaatccctttttcaatcatctcaagtccgaccagctttcgcggggctcctttttctttctgttcgcgcaatactgatttcccaaaaaaatcggaatctttcttgtgtttcacggcaaatccgattccggcttcaatcggtgtaatatctttcgtcaattcctgaccgtataaagcaagcttcgcttcaaatctcagcgtatcacgggcgccgaggccgcacggaacgaggccttcatgctctcccgctgcaagtatctccttaaatagatgaaccgcatcttcattgcggcaatataactcaaatccgtcttcaccggtatagcctgttcttgaaagcaggacttgacgtccggcaacgtccgcctcgtcaataaatgtaaacggctttaaggaggacaaatcacattcagtcagcttcgtaagaaccgactgagcattcggcccctgaacagcaagcagtgaaatcccgtcagactgattcgtcagcgtgacatcgccttccgtatgttccgtcagccaagcgatgtctttttcaatattagacgcgttaatcacgagcagatagcagctctcgcttttctgatagatcagcaagtcatcgaccgtaccgccgtcaggataacacatggcggtatagagcgcgtttcccggctttaaatcggcaacgtcatttgtcatcattttttggagaaaagacagggcgtctttaccggatacttcgacttcccccatatgggacacatcaaacaggcccgcttttgtgcggacggcttcatgctcctctttaatagaagaaaattgaaccggcagctcccatcctccaaaatcaattgtttttccgccgtattctttatacacgtcataaagcggtgttcgtttcagcatcatcttcccccttcagtcattggcgcattgtaaaaacatataaaaaaggacagagaaacacctcatgaaaatgaaggtttctctgtcccggcacctgaaagtttactttatgaacatatcataaagacgtcccctttggtggcctgcttcttctaaacgcagacactctccagagttgcgtcgagcaagagttcttttgcctgagagattcactcgcagtttgctccttcggcgcccggacgcccatctttcgtccgagtctctccccttgctgtcatccgctcatatttaccaattttatggacatactaaagcaatatcttttagtgaaatcattacttatatcctaccaccctcacttacgtccggcaacaaaaattatgataaatcagttttttaaaagaaaggcggttttgttacatatgacagcagagatcatatttgatgcaaactggccgggagagttttctgagcggctgaaaacggacggtccctggtcaaattgggagatgtacaaactgtcggctgaagtccagcagacccttgccattcctgaatttgaaggtttgagggctcctttataccttcccgatttcactccgcttccccatcagcttgaagtcgcgcagaaagtcgttgaaaaaatgaacggcaaggcaattttggctgatgaagtggggctcggaaaaacggtggaagcgggcctgattttaaaagaatatatgattcgcgggctggccaaaaaaatcctgattcttgtgccggcatcactcgtttcccagtgggtgaaagagcttcaggagaagtttttaatacccgctgttgaacagaaaaaaagctatgtgtgggaacagtgcgatatcgtcgtttcttctattgatacggccaaacgctcgcctcacaaagacattgtgctttctattccgtatgatctcgtcattattgacgaggcgcacaagctcaaaaacagcaaaacgaaaaattatgaatttgcgagaagtcttgtgaagaaatactgcctgcttctgacggcgacaccgattcaaaaccgaatcgaagaaatcttcaatttagtgtcactgttaaaacccggccatttaggaaacgaaagcggatttcaagaaaccttcaatcggaaggacgggattgacgctcatgagcatttgaaagagctcgtcaataaggtgatgatccgcaacacgcggagcgacaccggccttacatggacgaagcgccatgtggaaacagtgccgatcaccttttcaccgacggaacaggcgctttacgatgacatcgtcgcactgaaaaacggcacggaaaagcccgcaagcgcattttccattatgacgctgcaaagagagtgctgttcaagcagggaagccgtgtatatgacgctcaaaaaaatgcttgaccaaaaagacaaacaagcgcccgcattcgatgatcagacaatcgctaatttaatggaccgcattaatcaagtcacgcaaaactcaaaagcgattcaagttgttgacttgatccaaaagattaatgataaagtcattattttcactgaatacagggcgacacagatttacctgcaatggttccttcagcagaacggcataagctccgttccgttcagaggcggatttaaacgcggaaaaaaagactggatgaaggacctcttccgcagcaaagtgcaagtgctgatcgctacagaagccggaggcgaagggatcaacctgcaattctgcaaccatataatcaattatgacctcccgtggaacccgatgcggcttgaacaaagaatcggaaggattcacagactcggtcaggaaagagatgtccatatctacaatatggcgacaaaacatacggtggaagagcatatcttaaaacttctgtatgacaaaattcatttatttgaaaatgtcgtcggagaattagatgacatcttaacaaaaatcaaagtgagcaatttcgaagaccatttgcatgatattttatgccattcgctgacagaggaagaaatgagaatcaaaatggacaatctcacctcttttctgtcgtacggtacgggaaagcccgccagaaaaaaaggatcttaatctaaaaggaggaagcgcgacatgagacagcaggaggttcacgaatttttactgcgcttttttgaagcgaaccactgtccgattacagaacacgggccgggttttatgacggttcagttgacggtcgagatggacaaacaaattatgaaccgcccgttttattggcattggcgtgaaaaaacgggcggcgaaccgaacccgatgaagattacgttcatcactgataaagaaacggctccggaggatatggacggcgaatttatttactttggagccccgcgcctctttcaaatctttcaagcagttaaacaaaatgggagatttacaagaatatatgagaaaattgtatcagccggagccagagttccgcttcagccctggcttggattaaatgtagtgatttcataccaatccgacatgaaaaaagacagacttttgtctttaggcctgcatcttgtttctggaaccattatagaagggtttcagcagaagcttgcaccgcttccgctgacctcgcaaatatcagactattgctttaccatatcgccgatgattaagccggaaagcgggattaaaaggatggagcattacttaaaagacgctgccgccaaagagccgtcagcctgggctgacagcgcgatcgccagatggaaaaaggacctcaggctgctcgatcagttttatgagcagacagaggaaaaacctgaggaataccatttggaaaaacaagcgctgaaagccttatatcagccgaaaattcacattcagatcgaaaacggcggtttatttttcctgcaaagtaatttttctgggtaagcgttatccattcgacacctttcccgttttttctggaaattctatattataataaaagtatatagaaaaaatttctggcgtttcgcatgcgatgaatcacttccagacatgtaaagaaaaggtcatgggcggattggctgaaatacataaacaagtattttaggaggagaaaatgcatgaaaaatgcaaaaatggaattttcgcaattagataaggaatgggttgagctgatattagaagcccaaaaagcaaatatcagcctagaagaaatacgcaaatacctgctttcgaataaaaagtcttctcaacatgtccaggcagccagaagtcataccgtaaatcctttctgaatgtgctataatatcacaaggaaggtgatgacattgattggccagcgtattaaacaataccgaaaagaaaaaggctactcactatcagaactagctgaaaaagctggggtagcgaagtcttatttaagctcaatagaacgaaatttacagacgaacccctccattcaatttctcgaaaaagtctccgctgttctggacgtctcggttcatactttacttgatgaaaaacatgaaaccgaatacgatggtcaattagatagtgaatgggagaaattagttcgcgatgcaatgacatccggggtatcaaaaaaacaatttcgtgaatttttagattatcaaaaatggagaaaagcgcaaaaagaggagtagtgccgccatatgtgcacaactcctcttttaactgtccgactttcggattagtttttatcctcactgtgagccttttcattttccttgacgtaaccgtctttatccgtatgatctttcgtaatggtcaaaccgttccattgcgttgcttcaaaagagaattgaagagaaatcgcattgccttggaacttgttttgcacacttaatccgtccgcagttttagcggtgtcatttttaaatttgatttccattctcacctgatcataatcagcgggcgttttcggaactccgtcgtactcaggagctgttttgccgttaatggttgctacattgacttttccgctctcactcaagaatttcggatcaatgtgcttgctgatcgcttcggcagctgctttatcctgttttgttgacattaagtataagtctttcaggctggccgccttcaaaatgatatttttaggatagccgttgcccccttctttaccgactgtcagaaccgtaatttcaaactggctgaggaaatcctccgcagattcatttcctttctttgctcctttaaagtcagtaaaattcaaagccatcagcacttctttaatggcaagtgaaccgttgtttctgaattcgaaatctttcgtcaatttatcacctggttttaagtttgacaaattgacattggctgattgttctttagccgataaatcaagtgttcctgatgcaaatgtagcgtctgtcgacttcacatcattaaatgcggcccatgtgcctcctcctactaatgctaaaccgagtgcggctgaggcaatgcccaagcttaatttctttttcatacccatgtttgtactctccccttactttttagttttgttatcaaatcctgtcgccaggttgcaaccgtattcatgtagagatggttccctttttcgcatgttcttccagcgctttcgttttccgctcaatatcgcggagggcgctgacaatgactgttatggagtaaatcaaaagcatgacgccgggaacgattaacagaatcgccgttccgatcggctggctggccaaatggatgacatatccggcatacgggagctgatatcccgtatactgggcagccactttttcagcttgaacgggtgcggcatccgggacggcattatgatccccttttgtctcaaacagcaggttcccgtccttttttgtgatcccgattattctgtgtgtgacggctgttccgtcattttgcgtaaaggtgatcacatcccctttttctaagtcattcacgtcagaaattttctttaccgctatgagcgaacccgtcttaaattccgggtccattgaaccagacagcacggatttcagcgtgtagccgaagatggccggctcacccccggaagcccgggtcgaaatcaccgttaacgtcagcacaataatcaagctgaagatgacggcatacaaaatattactgatcagtttcagcgtttttttcatgttcttccccgctttcttttaccggctctgccggctctttctccgttttatttagatcggaaacggtcgcctgttcccggcatttgacgagtttcatcggttttgaccactcaaatttttcttcgtccgccggatacccttcaggcttgtaaaccttgaatgcgtatatgcccggcttcaaagaccgctttgactcaattttataaatcgttttgctttttttatcagtaataagccctttatccacaacattgccgtttcgtaaaggctgctgctgaaaagcgattttatggagctcccatttccagtcagaaacagtccgctcttttcccttattctccagctcggcatagagctgaagcggcgcacacacggtgcctgacgtatcagtttgatttgttatatgtaaatcactttgatcccagcgttcgtcataacggcaatcgtcatccgtatattgaaaatctccgcacgtttgaaccgggagactgaagcttttcacatcattgaaggaggaacttgtatcacctgtgaactgagcacatatcgtcactgacaggcaaaaaatgaacgaaagccgtaaaaatagcatcttccgccatctcaccttgccctttttttccattcgcaacaatcggaacatgccttaccccctgtaaaactgttaataaatatgacaaacgttctctttaaagaactgtatgaacaaagtataatcaaggattatcgtcttgaaaaatgtcaaaatcggtcaaattgttcgtttttaagaatggtatctttcaaaaacatcgttttgcttcaaattacacacctttttggaattttttctaataaaacgtgagaaaataacgaggtgcttagaacaaaatggaaagtatatacagcgaaaggacgaagaatgatgatcaaacaaagtctgatttgcctttctcttcttgttttcggggtttcaggaacagctcatgcggaaacggtgccttattatgctgttcaccatcaatcaaaatgggaaaagttagcagaaaaagaagctaaaaaaagatatccgctcgcccaaacgttatttattcaaaaggtgtgggatcggaaaagaacggacgaagcagtcaagcaataccacttgacattgcgggatggcgcaaaagaatttggcgtgtttgttacgatttcttttaatccctacagccaaaaggtaaataaaattgccgtcattgaggaataccaataaggccctcctgtatcaggaggacctttcgtgtgattcaactttattttttccgctgcatccacagcttaaaactgtacggcaatattccgaaccagtgctgagaagccggtactttcttttctttccgcacttcttttcgctctttccgttcctgtttcggcgtatcgaaatatttaacgaattgctcagtcatatattttacataatcatttgttttcacggctctcacctcatagtgctgtctttactatgaagtgttgtcccgccgcctcttttttatacttccgtccattgaatcagctgtttcttcttctgatcgaacaaaaggtgagcctcccgtctcgtacctgtcgtggtttccgtctgaattgtaacctgaaccgtttcccggcgatcactcccggagatgtgaaaagaaacggtgccatacggaaaacgctgtgtaccagttcgggccttttttccctgtgccatatggcggcttgacagcagcgcgccgttttggagcaggttctctccgatccagtactcccctgcctcttttgcaaatgtttttcgggtgatgaaatcagatgaagtatagctgatgacaagtaaaactgcggcagaaacaaacagaaccgcgggatatataaaaccgtcagatttggacatttaatcacctttcaaagagctgtaaaccggaatgaccgcctgattctttttacctgcaacgcttgagatctctaataagatcaggccgtttttcacatcagccgttaatgatgccgcgttttgcaggatcggcacgtggccttttccgtttactcttttccttatcatcttatgataaatttcaaaactcacttcttcgcctcctgttttccggcatgctaacgcccgtccgccgtccgccggcttcacagtctcagcctgtttacattcgttcatgatctgctgaacggcaatttgatgctcccggctgtctaatccgccgttatcggcccggtttgataaaaacagatgtaaaatcgggcccagggttcctgataggaaaagacagactgctaaggagaacaaaacattaagaagcgtaaagccagtctgttttgagaatactgaggcacatttctttttcaccgcggtcagccgcacacactttgtaatactcaccatcctccttccacttcacaccgggagacggcggcttttttccggtcatcatataagtgctgatatgtttctgaagaagctggtacgcttcctggcgatcttctattttcagaccatctgtcagcatgtccgtccagaccggaatgatagacgtcataaggaacagccaaatggccattgctgatagtgtttcaatagtagagaaccccttatttccgtttagcatggacatttccgctccctaagtaaactgttatctcataggtgaacccggcgctcttcaattgaatctttcctcccgaattcggatggcctttttcgttaaattcaaggctctccggtaaagttacaagtgtaatatgaagcgaatcaaaagaacgctcgacaatccttccgcctgactgcagtttgtatttatgctcttttggaagaaaagtgatttttgttcttttatgttctgcgatagccgtttcctgagcaagctgaatatctttttggagctgttctgttttttgccgcacggcaaggtgggtgcagaccggcggaaccgtcgtgaacaaaaccgtcagcaggacggacgccaggcttaacacaatcaggctttcaagaagggtaaacccattttctgtccgcctgttattgttcaactgtaacttctccgccactaattaagatctgtttaccattcgggcaggctgtattctttttgatatacccctctgattgtaaatcgttcatatccggcattttaccttcatgatcgatttcgtacgccgtcacttgggctttcaccatattctgcagtccttcacagcctttatgctgaatgctttgattatgttttgtaacgttaggaatggtgattaaaagcagaatggaaacgataaataaaacgatcagcatttcaattaaagtaaatccatcttgatttttcagacgaagcactcccttacatttggttcatcatctggtacatcggcatcagcattgacatgtagacaattaaaatcataccggccacaacaccgtaaatgacaggctggagaatgccggtatacttcgccgcgttttgttcaagacgctccatcataaactggctgtacgtataaagttcgcggtgaagcaggccgtttgcctgtccgtggctgactgcagccgcaagatctttttcataacacggatgcccggaaagagcggattctatggtttctccggctttcagacgtgtaatgagcatctctgcttcttcacgataaaaaggcagaaaagattgttctttaaaagctgttaagctgtcatagatagaaaggccggatttcagaagactgctgagctgtaaagagaaaaagtagctgttaaaaagaacggccgcttttcctaatagtggtattttcacaacaatcagcattttatcttgcggggattttttcttacataagaaccaaacgtacaaaaacaagcagaaagcggcggacagcgccagtgcgcaggcttcatgaaaatgccgaaaaaacgcaaagatgaaagcagtcgcaccggatgtattcatattcattgattgataaatcccagaaaactgcggaataattaaactttgcaggatataaaacatgacacagacggaagatattaaaaacatcggataccggagcatttttttgatttgattcgtctgtatgagctttctctgtaacaagtcgccgctttgtttcatcgctcccggcaattccccgtgtttctcagcgaaatagcagatagagacggcttctttgtgaaaagacagtgcctcaagcacttggtaaaacgcatcaccttccctcagccggcggattccgtccgtcagctctgcaagctgacgtttatgcagctggagtttcagcagtcttagcccttcaatcagactgtatcctttttccgtcatttcaccgagccttttcaaaaaagccgcttgatccttcaacggccaggttcgtttaatccgcttcatgatacacccaccgatcgtaattgtcggtcgtgacatagccgagcgcgattccttttctgatcagcctgcggagcgtctgatattgaaaattggcgtgctctccctttgcttcctgaaagcattgggtgaggtttttcccgtagagcagttcataaatgcccgcacggcgtgtctgcctgtacatccggcagtacacggaacagttttcctctttgcagaacggacatgttaaatcaaccagacgctgagcggcaatagcaatgacggtttgttcaatttctgtcatgttcacgccaaactccagcagcctgtatatggcgcccttagcatctcttgtatgcaggcttgaaagaacgaggtgtcccgtcatggccgcgcggactgcgatttcagccgtctcggcatccctgatttcccctaagatgatcatatcgggatcatgtcttaaaatcgcttttaaaccggcggaatatgtgactccggctttttcattcacctgaacttgcaacacatcctcatctcttgtttctacggggtcttcaagcgtgacaatacgccggttgaaatgcctttttgcatagttgacaagcgagtaaagagtggtcgtttttccagatccggtggggccggtaaacagaagcaggccgtgcgaatgcttcagaaaggacaataatgcggcgcccgccccccgaaataaggacaatttatccagagggggaatctgccgcttaggcaaaagcctgatgacaagactttcatcattcattgtcggcaaggttgacattctcaaatgaacggtttccgtcggaagcggcaaagacaatgacccgttttgcggcttccgtctttctcctatatccatggccgataaaaacttgaaatgagaaataagccttacgcattcctctttttttaagactctttttttcacaagagcatggccgatgcgaaaatgaatgaaagcatccttttctctcggtacaatgtgtatatctgaagcccttgccgtatatgcctcgtttatgatgttcctgctgtatgtttcaatatttttcacaagacttccctccttccgcacgtattgtaaatcagatacacaaaatccggcaaaggagagattatgcgttttacactgtgtaaaacgtaaaaaaataaaaaataagccccctgactttgatttaccgaatgaaatcgggaaccattcggccattttcagccagccatcaaaaaaagcaggcgtttgcctgctcttcttagcgtttcttttctttccgcaaatattttttttgatgctccctcaaaatgtcccctgtccagcctttctgccgcagataaatataaatcagcagggttgatacaataatgagcacgatggaacaaatatacgcatatttccaatgaagctccggcatgttatcaaagttcatcccccagagagctccaagcgccgtcatcggtgtaaagagagttgtaaagatcgtcaaggctttcacaatttcatttcctctttgggaggtaatgacttcctcggcgtgcagcagattgctcaattcctgatcaaactcattgatatatgtaattcctctttccatcttttgatgagctctgaggtaatctttctgcctgtcatttttcgggagaaaagcttcttttaaagccatttccacttttttagcccccagtgtaaggcctttccaaatgaacagctcatggcgcagtttatgcacattttccaagattcctttgctgttgtcatcatgaatctgccatttcagcgtccgctgcttgacttcaaattcatccagtccgatcagatatgaattcatcagctctcccagcagaacaaaaaagccttcaatcggattttcacaggtttgaatctgctgtgtggcatgcttttcttttacaccgcgcagcagcgaaaaatcaaaattaattgtaaaaaagaattctctcgtaatataaaagtgaaatacggtatggtttttttcatcatctaatccttgatgatagattaaagaaccgaaaaccgcttcattattctgatcatttgtatctgagcgcagaaagtttatatgattttcatgttcaaaccacttttcgcattgcggccagtgattgtgatggatcatttttttcgcttccgttttttcatgcggaccgagctggtaccacagccagtccgctcccgaatgtaccttcatctcttgtcatcctccagtatcgctttcttgttttattaccgtaaatgaagcaggctaaaccaggttcgatgtttgagcagctttctacagtggtattattccgaaaaaagggaggtgcaagccttccttcgcggaaggcgttacattgtatatcgtcaaactatctgccatcgtactatttattttattaacggcgtgttttgtcgccatagagttttcaatcgttaaagcaaggcgctcccgcattaatcagctcattgaggaagatgtaaaaggagcaaaagcagccaagcatgtcattacacacctcgatgaatatttatcggcgtgccaattgggcatcaccgtcaccgctttgggaatcggctggctgggtgaaccgacagtcaaagcaatgcttcagccgttatttttaaagaccggagttcacgaagcggttgcccaagtactgtcattgatcatcgcctttctgctggttacatatgtgaatgtcgttatcggcgaactcgccccgaaaagttttgctatccaaaaagccgagcggattacacttttgtctgccagaccgatgattttgttttataagttaatgtttccgttcatctggctgctcaatcattccgcccgcctgattacagccatgttcggcttgaagcctgcttccgaacatgaaatggcttatacggaagaggaattgcgggtgctccttgccgaaagctatcgaagcggcatgatcaaaaaaagcgagctccattacgtaaataacatttttacatttgataagcgcactgccaaagaaattatggtgccccggaatgaaatggtgagcctgccgttagacagcggatcgggacatatgctccgggacattattaaaacaaataaatatacccggtatcccgtagtaaaagaagataaagatcatgtagtcggcatcatcaatataaaagaagttttattcagattcctgtcagaaggagcggcgtttacaaaacacgaactcagcccttacatccagccggcgatccatgtgattgagacgattccgatttatcaattattcgttaaaatgcaacgggaacacgcccatatggccattctcattgatgagtacggcggaaccgcgggattagtaacggcggaagatatcattgaagagatcgtcggcgaaatccgcgacgaatttgatacggacgaaacaccttccgttcaaaagcttgggaagaaccgctatctcctgaacgccaaattgctgatcagtgacgccaatgatgtactcggaacagagattacggctgatcaagtcgatacactcgggggctggtttcttactcagcatattgacgcgaagcccgggagcaccattgattttgaaggctacacatttacggtaaaagaaatcgacagccatcatatcattacgattgaagctgacaaagctgaatagctgagggagaaatccctcccggccattcagctttttatcatcttaatgattcttttacgataaatccgtttttttccagcgctttcgccagactctgctccgttttcacctgagaaaaatcgatgccgagcttcacgacggtctgcgcgatttccggcctgatgcctgagattgtcgtttctatgccaataagttttgtgctgtcaatcactttaaaaatctgataagcgaccatcgtatccacaatcggcacacctgatatatctaaaaataaataagaaagacggagtgaagaacattgatcaagcaccgattccaaaatcatttttgcccggtaggtgtcaatttcgccgacgagcggcaaaattccaataccgtcggcaatcggcataatcggcgcgcttagttcgttaatcatttctttttgggcgtttaattgtgtaaccgtcactttataatattcctctgtaaatacttcaatcatatggtcaattgctttgttcagcttctctccccaatggaataccgcattcgccccaggcttctcagacatcgtttcacagcatgtctgtatgcggttccagaccaatctccggaattctttaaagctcgtgacgctttcatagaccggtacttcatggacggcccggtcccttgcgaactgaagcgcccattttgtcagctcctcttccccgccgtctttttccgatagaatgccggcaacgatttcaattaacagacggtgctgcatttccgctttctgatcatctgaaggccgccccgattttggtatgagcagccattggcgtgtgatttcacctgattcttcaattaaggttcgagataatgtttcattcaaatgtttcacaggtctcctccattcaaattcctttgtatgtataaatcggcgcctgacgcacatactgtaattacatccgatgggctatagccaagcggtaaggcaatggactttgactccgtgatcgttggttcgaatccagctagcccagtcccgcaaccgcaaaaaacgaagattagctgataaatttgatcagcggatcttcgtttttctcttatgatacagattgatgtaccgtttttttcttcgtcagcttcatcagttctcctggattgtatccgataacgagcttattgcgatcgatcagaatcggacgccgcagcagtttcggcttctcagtcaaaagcttcagcacttcatttacagtcatttcttcaatgttcaggttgaggtttttaaatatttggcttctcgtcgccaatatttcatcaattccttcggtcgttaatgataagatctgcttcaattcatcaattgtcggtgtctccctgaatagatggcgctcttgaaagtcaacattgtgggcttttaaccaatgtttcgtttttcggcatgatgtgcagctcgggtatgaataaaaaataagttctttcatttttaaaaattcctccctcggataatccgtctctttgttaacataagtaccctgaactttttttcattaaacatatttcaaaaagatttttcggatctttttcagagagcggcataagatataaaacacagggaaagacataaattccacaataaatataatcatgaaaatgtttacattttgagtgccgatctattataataaacttcagatagattctcgggaggggataaggaatgaatcgcatgttccgggtgttaggattttggacggggatatttgcagtcatgttttttttagggggcatgaaagacgcttctcttttgttttttggacagacgatctttttcgtatttctttcttatttgaatctgactgagcggatgtatatttatattttcggagcttacttaaccgtatttttcgccggatttacatattactctatttttattatgacaccgggcggcggaacccactgaccgaaaaagacagaccattatggtctgtcttttttcatttacagtgaaaaaccattgataaacgggtttcgctcctgctctgtctggatatccgtttccggcccgtgcccgcttaatacaagtgtatgtccgggaagcgtgagcagtttttgatgaatggaatcaagcaatacgtcctgacttccgccgtgtaaatcagttcggccgatgcctccctgaaaaagcacatcacctgaaatcaccagatccgcatccttcacataataagaaacgcttcccggtgaatgtcccggcgtaaacaatgtctccaaatggaaaggtccgatgtccaatatgccgtcgccttcaatcagccgttcggcgggccgtgccgttacggcgatgccccgcaatatgcctgatccgtttaaggaagagtcctccagccacttttcttcatttttgtgaagatatacgggaacatcccatctgtctcttacttcatcaagcgcgccgatatggtcaaaatgagcgtgcgtcagtaagatggcgagcggcttcagattgttttcttttatgtaattgttgattttgtccgcttccccgcccggatcaaaaataagacaggactgatcctcactgacaagaaaatacgcgtttgcctgaatcggaccggccggcattcgtctccatttcactttcatcacctctttatgtatatgcccttattatgaaggttttctgcggaagattcaatgaatgcgtccgggaaaacgctatcgacaaacaaaatgaaaacggttaaaatgaaatggaaagattttcaggttccaatgacaaaggaggagcatgatgttacttgttgtaatcttcggccttgtcgcattattagctgtattaggagtcctgcgggctgtcagacagagaaatatcctgggatttttgttagccgccgccacgctgggcgtgtttggctggtttaccgtaatgaccgttgtaaccagcggctatccgactgcacattaaaagcctgtatccaatggatacaggcttattttttattgctgcaaatgtttgctgacacttttgattttgctctccagcgtcgtttctttatcacgtctgtcatcaatgcggatatttgtcgccactctgtgcagccctttttggaacggggcttcgtgaatgtcctgaatgactgcgaataagtcgctcagctcaccttcaatcaacgtgttcatcggcgtgagctgaaatttgattttgccggcagctttgtaaccctccaaaatgttttgcacatccgctacatactcactgacgctcggtgtttttgttccgatcggaatgattgtcacatctgcaattgccatttggttcaaactcctttttcatttgttatgattggttctgtcatgcctgttttcagtgaaatcagacggtcatacgtaaagccgtataaagcgtattccccgttcggagagatctgaatcggctccatttccgtgtttttgagcaccgtccgctcccgttcgtctcctaagtcaaagctgatcagattgtaagagcggccttcaggcttgaatatgtaaaaccgcttatgtgtctgatcgtaatcatattccatcggcgcaaagctctcatacttttcttggagaggaaagcggtgtgtcacggatgccggcttttggaaaaggaactcgccgtctccgtccgattgatccgtttgtctgacggcaatcgtcatgcccgggcgggaatcagcccagatgacgtgatgaagcactcttttttctttttttgtctgcaagtcataagaatataaaggaccctcttcctccgtttttccttgcttgatatattggaattcatcagtggaggtccaatggacaaaaggggcctgaacgggactcttttttaaaatgccgttgttcatatcggccgtataggctgtgaagtcccatgtttcagtaaaaacggtaatcatcatttgatacgggtcatacggattccaagccgtctccagctcataagagttaaaggctttgtgataaagtcttttcccctgcttgttcataagcacaagctcagtctgacctttgcttgtcacctgtacgagaatcagctgttttttccggctgatctttacattgacaatattgccctttgtttcatagagccgttcggattttccgctgaaaagatcatatttcatcagctgatgatgtgctgtatacaggatcgttctgttatccagccatccttccgttttctccgcttcttttttactgagcggaacgattttctgttctgccgattttgccgaaacgcctgtgtcttgctgctgatgagatggttcacaagccgctaaacacagaacgaatgcggacagcagaacacaaaccaagtatctcaccagccttccccccattcttttctattgtcccatatttgtttatgtaaacaaatgagaaatttcacagatgtctcaaaaaacaagcgacctccacaaaataccttccgtcgcttgataaatatcagcaaactgatgaaaaggcaaagggttttttcccttcccgagctcaatggtatagccctcttttccatactgctgtataaaccaatccctaaaaccggcatggctgtcaatggttttaacgccttgatagcggtttccgcttatcgcttcaaactcccgaatcatccgggatgattgctccggttcacatccttcgtatccccaataaatctcttctccctgcgtatgaagcgcgatcagcctgtcaggcggctgttccgttatcagccggtgcatcgcctgcgcctccggttcagtgagcggcgccgtccccggaaaatcacggtatgaaggggctttcggtttgcgcctctgttcaatatcccaattggatgggaaatgtttatttaaatccacaccgtttatattcgccttccattcgcggaaatcggggcggtgctcatttaattgtttaagaaattcatttttttctgataaatcttcacatccgtaaagtacgagatcaaccccgtcgggatttacgagcggaacgaatgacaatgatgtccggctgaatatatcaagcgcagagtgcccgaaaacggttttattttcgcataatgccgcgcaatattctttacaccatttaagcgcgaccgaggtggtgatccattcattggcatgaaatgaggcgtttacatggacttttctttcagccgtatccgcacctattttcagctcataaagcggctttcccaatacggaactgccgattttacggtacgtgacaaacggaaagacatctgttattttctcaatttcttcataaaccgattgggagccgtacaccttttcttccttcacccattgatcagcggaaagaatcttttcacagcgccggatgtatcgcgaaagcccgctcagcgtctcaagcgggggaccctctgactgcccgctcacggcaaagccgggacaaaataattcatcgctttccgccgttttatcagcggctttcaacagtttttcatcaattgaaagcacctttgcaatatctgtcatatgctgtttcaattcaggtttgacacgaattcccgccatgttcatcccccttttttaaaaactatatgacaggggagataaaaaaagaaagccgcccgcgatatgggcaggcagactttcttcaacagttttgatgtttgagccattcatttttggcaatccacgccccgccgatgactccggcgtcatttccaagtgccgcaatcgaaatatcggccgcttccgcagaacgcgggaacgcggtgattttgaaagtctcttccacttttgaccgcaggatttcacccgctttagagacccctccgccgagcacgattttcgtcgggttcatggcgcttgccagatttccgagcacgaggcctaaatgttttgcgacataatcgacgacttcaagcgctgtcttatcctgctgtttagccgcttcgaacacgtcacgtgccgtcagatcatccacttgtaagagcgaagagtcggaaaccgccgcaagcttttctttcgcgatgcggacgatgcctgttgcggacgcaatcgtttcgatgcagccggattttccgcagttgcacggagctcctccttccggaatactgcaaatatgaccgatttccccgccggccccgtttttaccgtgaacgatttctccgttgacgatgatgcctccgccgactccggttccgagcgtcactaaaatgacatctttggccccgtcacctgcacccttccacatttctccgagcgccgcgatattggcatcgttttcaatgacggccgaaatacccgtttccgcctcgagatggtctttcagcggatagtttttccaccccatatttgtcgtctcatagaccattcccgtcgccatttccacgggtccgggcgctcccattccgatccattttacgatccgtttcggcttgttcagttcttccagcttctgatcaagcgctttggcgatcgtgaccgtaattgtgtttcctgatttatcggtaggaacttcccatttatgctgaatttcaccgtacatgttgatgaaggccagcttgatggttgtcccgccaagatcaatccccgcaaaccatgtatcttccataataatctcccttttcttattaaaatcctgctttgttatctgcctttgatccgctccgattctctctgaagaactccggcggctttttgccataattctctttcaatcacgtttgacaagtacatttcctttaattcatctttcataaagtcaatttcggcttgtctgtcaccgaaataaacgatatgtccgaatgacttaaacagctgctgcacgtcataaaatgaattcatctgcttcaccatttctattcttcttaatataagcgtatttcatcactgatccgggcgtcaagcaaaaaacgattggagaaaatatccttgtgtcattttcataaattgtatattcataattgtaaaaaaacactcatttatgcgtttttctgttacaatactttcgtgcccaaaagcacaaaaggattaaagtttgatggggtgttgttttgaaacaagaaaaaaggctgacgttcatctcagccatcagtttatttgtcttgatgttagcagtcattatgtcctgcctgtttttctttcatacagagccgcatatgccgctgttcttttgcgtcattattctgtctctggcaggtttgtggctcggtttctcgtgggacagtcttgaaaaaggaattgtcagcggattgaaaaacggtgtgcagccgattatcgtgctggctttgatcggtgtgctgatcggcgcctggatgtacagcggcgccattcccaccgtcaccgtttacgctttgtcaattatacagccgagtcagctgcttttgaccgcattattttcctgcatgatcatcagcacgcttgtcggctcaagtctgacaactgtcagtacaatcggcgtcgcgctgttaggggtagcaagcgcggcgggagttccgctcgaatggacggcgggagcagtcatttgcggggcttgtttcggtgataaaatgtcaccgatgtccgacacgacgaattttgccgccggaatcggcgaaattccgatttttaagcatattcgccatatgatgggcactaccgttccggcactgctgatcacgattgttcttttttatattctcggttcatcggtttcaataaatgccgcttcaacgcaaaatattgaggcggtcatttccggaatgaaagaggccgtgcacgttacgccttggtcgcttctttcacctctgttggtgatcattttagctgtgagacgggtttccgtgattccggtgcttaccgccggtattatttccgcagggcttctgactgctgtttttattcctgacagcagcattcaaggatttatatccgccctgcaaagcgggacagcgtttaaaaccggcgaccaggctgtggccagcattatcaacagaggcgggctccaatcgatgatgggttcagtctctctgatcatgatcgcctttgcgctcggcggcctgatggaaaaaacgggcctgatcgcggcgctgcttcaaggattgataaaaggcgtgcatacgaaaggacgtcttatcatggcgaccgtcttctcaagtataggcgtaaaccttgcgacaggtgagcagtatttatcgatcttaattccgggtcaatcttataaaccattatatgacaagctcagcattaagcggattcaccttgcccggtcgcttgaggacggcggaacattgatcaacccgctgattccctggggagtaagcggcgcttttatggcaagcgcattaggggtttccgtcatcgactacctgccgtttaccttttttctgtacatttctcctatgatctcaattctgctcggtttcttgaaaaaaagctgacaatacgagaaaacctgccgttttttaccggcaggttttcttatgcaaaaaatcccgctgaaaaacgggatttgtttaaaatgcctgctgaatgaatttgtttctgataaacggtatttttaaaaagaaatgaatgaatgaccgtctgatccccggctggctgagcacgctgttcatcagacggtagcggttttggtaaacggctaaaacagatacggcgcataatgagtagatcaacaattttttcatcttatccctcctgcccctatcgtttgtcaaacagcgagaattattccggtgcaagaagttttttatgcgattaagcgatggtttcagattcagtcacgatcatatcgaccggaatatcgtggggcatgcggggaatgcggtctgtcagctggcagtcaaagagaagcgacacagtacggcctttataaccggagaggtaccgatcataatatcctccgccgtatccgattctgaagccttcccggtcaaaagccacgccgggcacaatcacaaggtcaatgtcattttgggcggctttttccgtcaggctctcgatcggttcactgaggcccgcatatacggtttccagctgatcatacgcagaaaatgtacggaactccatcgctcccgtctgcggaaagcattttgggatacagacttgttttttctctttccaggcctgttcaataatcggccgtgtcggaatttccaggcgtgtcgagatggtaacggcgatcacgcgggcctgtttccattcttttaaagaaaacagcgtttcacgcatgctgcggcattttttctcccattcactttctgacatgtcagaa

SEQ ID NO: 38 - DNA, 87967 bp, Bacillus amyloliquefaciens
tttaacaggcgcgcctgtgagcgattttttgaataagctgtgcgcaagcatcggcaccagtgtgatcgaaatcaacagcgatgcggcaagcgcgaagacgattgttaatgcaaacggcataaacagttcgccgatctgtccgccgaccatggcaagcggcaggaatacggcaatggttacgatcgttgatgacatgatcggtttaaacatttctttcgtcgcttcacgcaccaattgcttcccgcgtaaaggttcatctttcagcctcatgcggcggtaaatgttttcgatcacgacaatcgagtcgtcgactacccgtccgatggcgaccgtcatcgcaccgagcgtcattatgttcaatgtgacatcaagctgattcagcacaagaagcgcaatcagcagtgacagcgggatggaaatgatagaaatcatcgttgatttaatatctcttaagaataagagaatgatcacgaccgcaaaaatcgcgccgaaaatcgctttgcttaacatcgtatccaccgactctgtaatcggctctgccatatcaagagtcgagctgtacttgaaccctttatggtcttttttgtattgattcagttcatctttaatcgcatcggccacttctaccgtgttggcgtcattggcttttacgatattaattccgatgctgtcctttccgttcgtgcgggaaatggattcagcttttttcacatctttaatgtcggcaatgtcagaaagcttgactgtcggcactcctgctgccgcgctttgctgtgcctgctgcatagcctgagcgtccgccgcagatgccgcaccggctccgcccgcttgaccttgagcggcagaagaagatgtgactggaattctcatatctttcagatctttaattgacgtaatatttccgttaacaacaactgatttttctttgttgccgaatgtgtacaatccaagcggcgtattgacgtcagagccttggatcactttcttgacggtatcttcatcaagtccgtactctttcatttttttgtctttgaaagagaattccacctgctcttcctgctgtccggaaacttgtacggacgcaacgccctgaatgccttcaagcttaggaacgagagtgttttccacatttttggtcaggtcttcaagcgagcttttgccgcttgtcacactgagcgtcaaaatcgggaaagagttgaggctgtaacgggaaatgtcaggttttttcgcgtcgtcaggaaggctgacactgtccagcgcttcagcgacttcggttttcgccttgtccatatccttgctgtaatcatattcaatcataaccgatgagacgttttcagaggatgtggacgttacgacgctcactccttctaaattctggaccgcctgctcgatcggttttgtcacgtcatccgcaacttgactcggagcagctccgggataagtcgtatttactgaaaggtaaggcatgttgacgtccggtatggattcctgcttcatattcataccggcatacagccctgctacagtaacgataatcgtcatcagccaaactgcgaatttgttcttcagtacaaagttaataatgtggttcatcatgtcctccgttaatttttattgactgactggtcattctatataatactaaacggtataactcaacatcgtcaactaataaggcagtaaatttttctaaatttttcaggattaaggggaagcacgtcatgaacgaaaaaaaagagaaaatcataaaaacaggcatccatttatttgccaaaaaagggttttcttcaacaaccattcaggaaatcgccggtgaatgcggaatttcaaaaggagccttctatctccatttcaaatcaaaagaagaccttttgctgtcagcatgtgagtattacatcggcatgtctatggaagaaataaagaaaatcaaaacagaacaccagcataaaccgcctaaggacgtattccgaaaacaaatcgcttatcaattccaggaatttatggagcacaaggactttatcattctcttgctgagcgaaaaggtcattcctgaaaatcaaaaggtcaaacagtattttcatgaggccaatattcaatttaacatgctgtatcgggatgcgttgctctccgtttacggagatgccgtcacaccgtttttagcggatgcgtccgttatggcgcaaggaattgtgagctcctatattcatttcttgatttttaatgaacatacggcattccggacggaaaacgtggcggcctttctgattgccagaatcgatgacctgattacgggactgataaaagacaaccccgatccgctgctgcctgaggatatcttcactcagcccgcggcggacagagaaagactgcttgcggatattcaaaagataaaagcacagcaggggctgcctgaggacgtcctcgtatcgcttgaagtcattgaagaggaatgcgcaaaggaagagccgcgaaaaccgattattaaaggaatgctgtccaacttggcaggcagcggaactgaacagattgaaacgctgcgggcttccattgaaacctatttcagcttataaaaaaaagagaccggcgcttaccggtctccgtgtcagcagcgcccttagaggcggctgcttttttttatcgttttttgatttcttcaagtaagatcttgttgaccatcggcgggttggcctgtccttttgaggctttcataatctgcccgacaaggaagccgatcgcgcggtcttttccgtttttgaagtcttcaattgactgcgggttgctgtcaagcgcatctgttaccagcttcagaagcacgctttcgtcagaaatctgcacgaggcctttttctttgacgattttttctgcgtcgccgcctttttcaattaattctttaaagactttcttcgcgattttagacgagatggttcctttttcaatcagcttaatcatgccggcaaggccttcaggagtcagggcgacatcctcaagctctttttgttcggcgttcaggtaagctgagacttcacccatcagccagtttgatgcctgcttggcttctgcgcctttattgaccgtttcttcgaagaaatcagccatttctttcgtcagcgtcagaaccattgcgtcataagcaggcagaccgagctcttcgatataacgcttgcggcgctcgtccggaagctcaggaatggttgctcttacgcgttctttccattcgtcatcaatgtagagctcgacaaggtcaggctcagggaaataacgatagtcgtcagaaccttctttgacacgcatcaaaatggtttttttcgtcgcttcatcatagcggcgcgtctcctgctgaatgactccgcctgacagaagcacctgctcttggcgtttttcttcatgctcaagtcctttttgcacaaacgcgaaggagttcaggtttttcagctccgtttttgtgccgaatttctcctggccgatcggacggagggaaatgttggcgtcacagcgcagtgaaccttcttccattttacagtcggaaacgcctgtgtattggataattgatttcagcttttcgagatatgcgtaagcttcctccggtgtgcggatatccggctcagatacaatctcgacaagcggcgtgccctggcggttgaagtcaacgagggaatagccgtcgcccgtatgcgtcagttttcccgcatcttcttcaaggtgaagacgggtaatgccgatttttttcgtttttccgccgacttcgatttcgatccagccgttttcgccgatcggcttgtcaaattgagaaatttgatatgccttcgggttgtccgggtagaaatagtttttccggtcaaacttcgtatccgttgcgatttcgcagttcaaagccattgcggctttcatcgcgaattcgaccgcttctttgttcaaaacgggcagcacgccgggatagccgaggtcgatgacgctcgtttgggtattcgcttccgcgccgaatggcgtcggtgagcttgagaaaattttagattttgtttttaattccacatggacttcaagtccgattaccgtttcaaagttcacttcatttcaccccttacagttcaggtttcgctttatgatgatctgttgcctgctcaaaagcatgagcgacgcggtatacagtgccttcatcgaagtgttttccgatgatttgcagtccgagcggcagtccgtccgcaaatccgcacggcacgctgattcccggcacacccgcgaggttgacaggaatcgttaaaatatcgttggcgtacattgtgagcggatcgctggttttttcgccgattttgaatgccggtgtcggcgttgtcggtccgacgatgacatcgtatttctcaaatacgtcttcaaaatctttcttaataagcgtgcgcactttttgcgcttttttgtaatacgcgtcatagtagccggagctgagtgcgaaggtgccgagcatgatgcggcgcttcacttcattgccgaatccttcagagcgtgtctgtttataaaggtcgatcaggttgtccgcattgtctgagcggtagccgtagcggatgccgtcaaagcgcgcaaggtttgcagacgcttcggaagaagacagcagataatacgtcgcaagcgcgtatttgctgtgcggcagagatacttcttcccatgtcgctccgaggtcttcaagcacttttaaagcggctaaaaccgattctttcgcttctttgccgacgccttctccgagatattctttcggtacggcgatttttaagcctttaatatcgccagttaatgaagaaagaaagtccggcacttcgacattggcgctcgtagagtccattttgtccgggcctgaaatcgcctgaagcaggaatgcgttatcttctacgtttcttgtgatcggtccgatctggtctaatgaagacgcaaaagcgaccaaaccgtaacgtgacacgcgtccgtatgtaggctttaatccgacgacgccgcagaaagaagccggctggcggatggagccgcccgtatcagatccgagtgaaaacggcacttcgcccgcggcaaccgcagctgcggaaccgccgcttgatccgccgggaaccgtatcgagattccaagggtttttcgtcgctttgtacgcggagttttcagtagaagaacccatcgcgaactcatccatattcagctttccgatcgtgacggcttcagcagcttgaaggcgctccacgaccgtcgcatcgtaaatcggatcgaagttttcgaggattttgcttgagcatgttgtgcgaagccctttggtcacgatgttgtctttgacgccgatcggcattccgaagagaagaccgtgttcagaccgtccgtcaaccgcttcgtcaagttctttcgcgtaagcgcgggctctttcttcatcaagctgcaaaaacgcctgcaccttatcatccacggatgcgatccgtttgtaagattcatcaacaagatcggaaatcttgatttcttttttatgtatcatttgtttcagttctgtgattttgtgatcaaataatgacatactgtctccctcctttaatccagaatagatggcacacggacatagccgtctttatgatcgggagcatttttcatgacatcctcgaccggaaggcctttacccgcttcatcttctctcattacgtttttcattttcagcacgtgtgttgtcggttccacgttatccgtgtccacttcattaagctcctcggcaaacgagataatgctgtcaagctgttctgtgaacatttcagcttcttcatccgtaatggcgagtctcgccaaatgagcgacatgctttacttcttctatagaaattcgtgacataagatccacctccgcataattctccgtttcgtcatataatactgatcatatcaaaaacgagccctctaaagcaacaaaacgccgccttctgaggcatgatgaaaccctctctattttatcctaaatcggggagaaagagaaacgaattatatgtcagaaaatttttacttttataatctattggtagcgctttcatctctaagctgttctatgttggcggggattttttccttgagcgggccaggtttcgagagttgattgatcggggatactttgttaggtttagtaaccatagccagcactaaatcatgcgatccgcatggaatgatgactaaaggctggatcgccggcgcatattccggcactactaatctacagaggtgatgcaacatttacatgaaagaagagagggaccaaaaacgtgagtattgaactaattatatctcttggcatttactttgctgccatgctgttaatcggctggtacgcattcaggaagacaacgaatattaatgattacatgctgggcggaagaggactcggcccgttcgtaacggcgctgtccgcaggtgcggccgatatgagcgcatggatgctgatgggagttcccggcgcaatgttcgcaacggggttatcgaccttatggctggcgctcggtttgacgatcggcgcgtattcaaattatctgctgcttgctccgaggctgcgcgcttacacggaagttgcggatgatgcgattacgattcccgattttttcgataaacggttccgccactcgtcatcattgctgaaaattgtttccgccgtgattattatgatctttttcacactgtacacatcgtccgggatggtatccggaggcaggttatttgaatcggcattcggcgccgactacaaattcggtttgtttttaacggccggtgttgttgtgctttacacgctgtttggcggtttcctcgctgtcagtctgactgactttgtgcagggagcgatcatgtttgcggcattagtgcttgtgccgatcgttgcttttacccagctcgggagcgtttcaacgacgattgattcgatcaacgccgttaacccgaaactattggatatctttaaaggcgcgagcgtcattagcattatttcttatttggcatggggactcggctattacggccagcctcatatcatcgtacgatttatggcgattaaagaagtgaaagatttaaaacccgcccgcagaatcgggatgagctggatggttatttcagttatcggttcattgctgaccgggattatcggagttgcgtattctcatcacttcggagtctccgtaaaagatccggaaacgattttcattattttttctaaaatcttgttccatccgctgattacgggcttcttgctgtccgcgattttagcggcgatcatgagttccatttcctcacagcttctcgtaacggcaagcgccattacggaagatttataccgcgcctttttcagacgggaagcgagcgataaagaattggtcatgaccggacgcctgtcggtattgatcgtagccgttatcgccatcctgctttccatgaatccgaacagcaccattcttgacctggtcggatatgcgtgggcaggcttcggttcggctatcggaccggcgctcttgctcagtctgtactggaaacggatgaatgaatggggagcgcttgcggcgatgattaccggggccgcggccgttttaatctggatcaccacagggcttgccgcttcaaccggcgtatacgaaatcattccggggttcttcctcagtctgattgccggtattgccgtcagcctgctgaccaaaaaaccggccgatgcttcttatcagctgttcagccggatggaaactcttttgaaaaacaagaaatagacaaaaagccgtcagattttatccctgacggcttttttcttccgcacttgtcctgctataaatactgtgagaaaatcatatcaatttattataagaaaaattgcggaggtgctgtgcaaattgagctggcctatcgaaccagacattttattaaagctgggcattgccacgctgatcggcatgatcatcggtcttgaacgcgagctgaaaaacaaaccgctcggactgaaaacctgtatcgtcatcgccgtcagctcctgtatgctgacgatcgtcagcattaatgcggcatatcatttcccaaaatattaccgtatcatgatggatccgctccgcctccccgcccaaatcatttccggcgtcggttttatcggcgcgggcgtgatcctgcgtaaaagcaatgacgtcatatccggcctgacgacatcggccatcatctggggcgcagccgggctcggtctggctacaggcgccggcttttataaagaggcgttcgcaagcctcttgtttatcctgatcagtgtcgaatttcttccgtggctgatcagaaaaatcggtcccaaccgcttgaaggagaaggatatccgcgtgagaatgtctctttccgataaagacaaaatgaccgagattctaaaagaaatgaaaagcaaacggctccgcattcactccgtccggattgatgatctgcgcgaaaaagaatttccgattatggaagtgaaagtcagtgttcacaaaaaccgctacaccactgatgtctattatgatattaaagaaattcaaggtgtcgtcggagtgaagtgtgatacgttataaaaaaacgccgggctggattcagccggcgtttttctatttatacgaatgcagaaaagttatactccgtaatcggcgtttcgttttcgatatcgcgcctgaaggctttcagcatctcacgttcctcgtccccgagtgaattgaggtcaaacgcctgatgcaataatccgtagatcagcatatggcgcagccggagaaaatccgggatgtgttcaagccaggcggggtcaaggtcattttcttccctgtagcctttcataaagtgtgtcatgaactcacccgtaaacgcggccttgtcttcatacgggatgaccggataccacaacatgttgtacagcagaatactgatatcattcacaaaccaattgtagccgatatcatcaaaatcaaatgccgtgattttcccattgtcccagttgaaattaccgtggtgcagatcggcgtgcacaaggccgtagttttcaggattcttcggcaaacggcgcagtttttccattagagcatccgcccgctcaaatacgagatgctgatctgcgggcacgtattttctcagcttcagctgctcctcttcatcccattcctgccttttatatgccggatcgctcagacggtagctttttgtcagccggtgcatgttccccgtgtactttccaagctcataaaacagagttccgttccagtctgattcctccactttgcgtccgggcgctttttcatagactcttactaaaaacgctccgccttttccatccggcacttcttcgacatctctgccatttaatgaaggaatcggttttgctgctgaaagccctccctttgccagatgatgaagccattccatttctccgagaatatattccggtgttcttctgatcgtatgcgtaatttttaagatatacggttcgttatctttcacaatttcgtatacgtagttctctgcgtccgcaataaattgaaacttggtaaagccgtatatttcaccggcctcagccagtaccttatcttcctcaaaaatcgctttaatatctttatgcatgctgattcacccttttcataacgtttgtaggcggtgtgtgtactcagcaaatgtcattcatcaacattcctgcccttcttttttcacagcagattagtaacatccgcttagaaataatatgtgttttcctgttaattcctaattatacaaatatcttaacatacctcatccctctctccaacgatattcacaataaaaaaacccttgctcatacagaaatgaacaagggcatcttggttaatcgtaaatatggacggtcggttctttgtcacccgcattgcggacgatcagcgcttcctggccgtcagacgaggtaatgttaatttcgacatcaactgagccttttgaataataatccatcagctcacctgttaagtattgggtaaaggcgataacttcgcttttcccgtaaaattgcatcgggatttcaatcttcatttttctcatttcatcgttttcgtacattgccgttccgacgactccggtgtaattcgggaagtagctgtcgatggcgtttttgaagcgtttaaacacttcggaatcatcagggtatttctttgccgtgtctgtatccgccggatagaagacgtacttttctttgacatcatcccagtttgaaatggtggatgagccggccttgacttctgttttcgcaatgtaattccccggtacgattgatgttttcggcgcttgtttataaagggcgacggtgatcggcacatttttcaggttatccattttccgaaggcggttaacgacttcctgggcgatttcttcaccgtggctgcggatcgttttgtcgctgagctccacttcctgctgcggatcacctgtgttttcgcggtaatagtatacagagttgagagcgagaccgatcatgacacctccaagctggatggaatttttatcttttcttactaagtaatcctgctcaagcatggacgctaagtaaatcgggctgttttcatttttctcttttgccgatcccgagcttggcagcacggggtttaagccgagattctgaaaattggcgtctgcctttttcgcctttttcagatcactgccctcttttttgcggtcaagccagctgagtaccgtgtcctcatctaaatactggccttcctgatacaaatagtcatccgtcgggaacgtgtcttgagcgagccgcatcagacccgtctcgaattcatcgatgtccagcctcgtgttcagccggtccgcggtcaggccgcgcgcttttccggccttaaacggaagcaccattttatagtaggaatcagagatattatatttcggtatgatcgctttttcagaagactttgccgttttctgcgtgatctcttcctctttgttccccccgaaactcggcgaacaggccgacaacatgagtactgccgccgttgccgtcgccgccaatgccaacatctttttcaatagaaaacactcctcttatttctttagctctcccaatagctgtgcttcattccatacttcaatgtttaattcctgcgcttttgtcagcttgcttccggccgcttctccggcaatcagcaagtctgtttttttgctgacagatcccgtcagctttccgccgagcgcttcaatctgcgccttggcttcatttctggacagctcttcaagctttccggttaacacgatggttttgccggcaaaataagagtcgctgtccgccgcttttacttttttcgggcctttgtagagtgtgttcacaccgagttcctcaagttcattcaaaagctcaagcatttcttctttgcggaaataggtgacaacggcatcggccatcttttcgccgatttcatctaccgcaagcagctcttcttccgtggcttgtttcagattttccaggctttcaaaatgcatggcgagtgttttggccgcttttgagccgataaaacggatgccgagaccgaacagcaggcgttccagcgaattctcttttgacttttggatggagctgatcagattgtcagttgatttttcccccatccgctcaagccggataacctgttcttttgtcagcttatacaaatcagcgacattacggacgagatgttcacggaaaagctgtgtgatgacacgttctccgagtccgtcaatattcatcgcgttgcgtgagacaaagtgaatcaggccttctctgatctgcgccggacattccggattgatgcagcgcagcgcgacttccccttcaatgcggacaagttcgctttcgcactcagggcagctggtcggcatattgaattctttttcttccccggtccgctgttcgattaagacattgacgacctcagggatgatgtcgcccgcttttttgacgaccactttatcgagaatgcggatatccttctctttaattaaatcttcgttatgaagggaggctcttgagaccgtcgtccccgcgacttttaccggttccagaacggcggtcggcgtaatcacgcccgttcttccgacattcagttcgatatcgagaagttttgtcacgacctcttccgccggaaatttataagcaatcgcccagcgcgggctctttgccgtatacccgagctcttcctgctggtcgagcgaatcgactttgatgacgattccgtcaatttcatacgggagatcggcccgcttcgcctgcagctcttcgatcatttcaatgacttcatctatcgtggcgcattttttccgttcctggtttgttttaaaaccgagctcatccagaaaatccaggccctgactctgtgtttccacacccatctcgtcaagctccgctatactgtagacgaagatgtcaagatttcgtttcgctgcaattttcggatcaagctgtctgagtgagcccgcagccgcgttccggggattggcgaacggctcctcttcatgtttcagcctttcttcattgagggcttcaaatgactgtttcggcatgtacgcctctccgcgcacttctatggaaagattccgtttcattttcagcggaatgttgcggatcgtttttaagttttccgtgatatcttcgcccgtcgttccgtctcctcttgtcgcgcctctgacaaaatagccgtcttcataacggagagaaacagcaagaccgtctattttcagctccacattataagcgacgccgtcaccgacagcctgacggacgcggcggtcaaaatcgcggagatcatcatcgttaaatgcgttgccgagactgagcatcggcgtgccgtgctgcaccttttgaaacgattcaagcaccgctcccccgacccgctgtgtgggcgaatcaggcgttctgagctccgggtgctcttcctctatggcaatcagctcctgcatcagtctgtcgtactcggaatccggcacgctcggttcatctaaggtgtaatattcataactgtactgatcgatggtgcggcgcaattcttctgcccggtgtttcgctgtttctttgtccatcatgttcttcctttcctcttcaggttactgcttttcaatcggcgcaaaagcggcaagcagacgcttcacgccgactgggctcgggaatgcgatatcaagctcggtgctttcgccttctccttttacgctgacaaccgttccggtgccccattttttatggcccgctttatcgccgaccgcccagctgagcgagtcgccgcctgttttgttcgcatatgaaacgggacgggatacgggcccgcgtttcggctgcacttttcttcccggctgcatgcgaggtgttttcttctcatttaggttctccaataaatcgccaggtatttccctgataaagcgggattccggattcatattggtgcggccgaataaggtgcgcattttggcattcgttaaatacagttcttcttccgccctcgtaatgcctacatatgcgagcctgcgttcttcttccatctcggcttcttccatcagggagcggctgtgcgggaacacgccttcttccatgcccattaagaacacgacaggaaattcaagccccttagcggcgtgcagtgtcattaaagtgacggcatcctttccgcctgattcctcttccttctggtcgagctggtcaatatccgcaatcagcgccaaatcagtcagaaacgcgacgagagacttgtcttcgcttttttgttcgaagtttttcgtcacggaaagaaactcgtcgatattttcaaggcggctttgggcttcgattgatttttcggccttcagcatttctctgtattccgttttttcgagaatttcttccgtgagttccgtaatggacaggtaatcctgcatattcgtcagattttcaatcatcgcgccaaagccgtcaagcgcgtttgccgctttcgcgctgacgccgatgaaatcaacctgtttgaccgcctggaacattgacattccgttcatcgccgcatatgaagcgattttttctagcgaagttgcgccgacgccccgcttcggcacattgacgatccgcgtaaaactgatgtcgtcgtccgggtttgacacaaggcgcaggtatgcgagaatgtctttaatttctttcctgtcgtagaacttggttccgccgacgatattgtagttcagtccggattttaaaagggtttcttcaatgacgcgcgactgggcgtttgtccggtataaaatcgcgatatcggaaagcttccgccggcccgagctgtgcagctcataaattttgcccgcgacgaattggccttcgccgaattcattgtcgccgctgtaataagaaagcttgatgccttcgtcattttccgtccacaggtttttcggcttgcggtttgagttgtttttgatcacttcgttagccgcctgcagaatacgctttgttgagcggtaattttgctcgagcagaatcacgtttgcgctcggataatctttttcaaaggaaaggatattcgcgatatccgccccgcgccatctgtaaatggactggtcggagtcaccgacgacgcagatattttcaagacgggcagcaagctgcttcacaagcaggtattgcgccctgttcgtatcctgatactcgtctacgtgaatgtactggaatttgcgctgataaaactcaagcacttccggcacacgctcgaaaagcttaattgtcgtcatgattaaatcatcaaaatcgagcgattggtttttcagcagttttttctgataatcggtatacacgtcactcgtgacctgatcatagtagccgccggccgtttttgcgaattcctcaggttcgatcagctcgttttttgcgctgctgatggagcctaaaatacttctcggatcaaacttttttggatcgatattccgctctttcagaatccctttaataacggaaagctgatcagccgtatcaagaatggagaaatttcggttgatgccgattctgtcaatatccctgcgcagaatccgcacgcacatgctgtggaaggtggaaatccagatttcatccgcgccgggtccgagaatgctctccacccgctccttcatttctctggctgctttatttgtaaatgtaatcgccagaatgttccatggcgccacgtgtttttccgccattaagtatgcgattctgtgcgtcagcacacgtgtttttccgcttcccgcgcccgccatcagaagcagcggaccgtccgtcgtcttgaccgcttcctgctgaacgggatttaatccgcttaataattgattgctaatgtaattcatatccgttcaccgcctatcaaacatatgttctatcataaatcaatttcgtccgcttggctactttgtctttacagccgccaccgttttaagcgcctgatcaaaatcttcatatacggcatttccgacaacgataacatcggcatgacggccgaaccgttccgccgtttccgcgtctttaatgccgcctccgtaaaacaggacggacttgtccagcacagctttcgttttctccaccgtttctatgtccgccagcatcccgctgtattccagataaaaaatcgggagatgaagcaaatgttccgcgacccgcgcataggcgagaatatcttctgtttctatatgtgtatccgcctccgtcaaagcggccgccttacaatcagggttgacgatgcagtagccctccgtcacgatttcctccattgacatgagctctccgtattctttcatcgcctgatgatgcatgccgacaatccagtccgcctttttgctgttgagcacactcggaatgaaataaagatcaaacccgggcacaatggaatcaatcgtcgacacctcaagtacgcacggcactaaaaaccgccgcacctttgacatcagtctgagcacattgtcctcggtgatattgtcgcttcctccgatcacaatggcgtcagtccctgattcacaaagccgttccagctgttcatccggtaaatctttattcggatcgagtttaaaaacatgcttccactcgttaacatcgtacatgcgttttcgttcctccattcgtttcttgccatttaaacattataacaaattcgtttggcccggaaaaacggaaaaagacgtcattcacctgattcacaaaaaaagattgcgctccgccggacgggacatggctatgtttgaaaacagacaatatgtggaatgtcaaagagaaaaaagacaaggagtctgatctgaatggaacaagccattatcgtactgatttgtatattgatttttattattttagttcccgccgtattgtttctctggatatacataagagacgaaaagcaggaagaacattcagtgctgcgcaattatcccgtagcgggaaaactgcgctatatatttgaaaaaatcggacctgagctgcggcagtatttattcagcaatgataacgaagaacagccgttttcccggagagaatatgaacagacggtcatgtcgggaaagtataaaagcagaatgatgggcttcggctcagaacgggatttcgatcagccgggctattatatccgtaacgcccttttcccgaaacaaagggaggagctgcgcacagatcagacgccgaagatcgacacgatggtatacaagattgacaaagacaacctgctgaaacgcagcgaacaccgcgaaaaagcaaaagcggacccttattacctgcatccggacgatgtgcaagtgatcggccgcgatacatgcaagaagccgttttatgtgaaagggttaatcggacaatcagcgatgagctacggctcacttggcgaccgggcaatcaccgccctgtcaaaagggctgcaccaggccggcggcacatggatgaatacaggcgaaggcggcctgtctgagtatcacctgaaaggcggcgcggatattatctgccaaatcggccccgggctgttcggcgtgcgcactgaagatggagaattttcatgggaagaatttaagaaaaaaagccgcctcgagcagattaaagcctttgaattaaagcttgcgcaaggggcgaaagcaagaggcgggcatattgacggttcaaaggtgaccgaagaaattgccgccatcagaaatgtgcagcccggacaatccattgacagcccaaaccgcttcaacgagttctcaaatgttccggacatgcttgatttcattgagaaattaaggactgtcggtgaaaaaccggtcggcatcaaaattgtcccgggaagccgcaaagaccttgaagaccttatttcctgtatgagttcatcaggcaaacttcccgactttattacgattgacggcagtgaagggggaacgggagcttctttccatgagctggcggattccgtcggcctgccgattctgaccggcctcccccttgttgacggccttttgaagacatacgggataagagataagctgaaaattttcgcatccggaaagctgctcactccggataagattgccgttgccctcgcgttaggcgcggattttgtcaatattgcccggggaatgatgttttcagtcggctgtatccgcgctcaagtatgccacaccaatcattgtcctgtcggagtggcgacaaccgacccaaaacttcagcgcgcgctcagtatcgaggataaacagcaccgcgtctgcaactacgtgctctcgttgcgtgaagggctgtttcacctcgccgcggcggcgggcatcagctcgccgattcatttctcagctgaacacatcgtataccgggaggaagacggaagcctgagggaacttcccggccttttgaatcagcacgtataaaaaaaaccgcctgccgtcatcggcagagcggttttttacgtagctgaggaggattctcctttgtttacgcggtcaagcgccatttcataggcgtcgttaccgtaatttaagcatctcttcacccgggaaatcgtcgctgtggaagcacccgtttcgctttcaattttgtgatacgtatttccttcgcggagcattcttgccacttccaaacgctgcgccagcgattggatttcattaatcgtacaaagatcatcaaagaaacgatagcattcctccagatctttcagcgataaaatagataaaaataactggtccagttcttttccgcgtaatttatcgatttgcatcgtcaaacaccttctcctttactaatggaagctgcatcgagatcaggcacgatattaatccatgtctttcctggcacaaacggaagaatctcaccgccttttacgggcagaatacggccgtctttatattcccagtctgactccataacatcgccgtgctgaagcaggaggcccttcccccctgtctgaatatcgatggcccgccttccatctttgtctgtcatgcgatggccggcttcaacaataaaaatattgtgcatggctaaaggctttccggtctcccggtctgtcgctttcacaccatcagagcttcttgtataagcatcagcttttttatcataatcgtattcgacaagatttgtaacgttttgtgttccataatctatccgaatattgtaggtttcgtttccgggttttgcatctgatgtctgaaatgggagcggttctgtttttccgttcagcttgtatcctttttgttccgccgccttcctgatattgtcataggacgtgtaggaattgtggggcggcttgctgaaatcagctctccaaaacaggcttccgtcaaaatccaaaccgtttatataatcgtaagctccggactccagctgcttttttgcgccgggactccagccatgatggacaaatatgctgttaaacccgctgctgagcgtgacaaaatattctctcgcgctccgcacaggcccgaccgtttccggcatctcactttgaaaaatcgcgagaaaccgcgtaatctggccctccgcgagcgcttcgatgacaacatccgcctttgacagcccggattggggcctcgccttcggatgattgttcactgcgactgcaatcggacggcgttctgcaagcttctgctcagttttcagccccgttaaaggagcttccgcttctttcggctgcacctgatcggcattgttctgccggcaggcggcaagcagcaaaaacgcaaaacaaagcatacaaacggttttccatcttttcatatgtcggctccctgcttttatattttaacgcattatcgatggaaagagtacagtttttttcatcacgtcgaatattcctctcggcgtaatgcggatataaggcaggtgtgtgctctgcaaaaagagcagcgtatagatcggatcgcagaatcggtagccccgctcctccagcagcgtcctcagtttttgctctttctcaagcacttcttcatacttctccgcagatgcagaaccgtttaaggcgaggggaatctcatgaagaatcttcccgttttcggcaagcacgattccgcccccgatttctttcatccgtgagaaagcgagcaggatatcttccttattttttccgacagcgataatatctccggttgtcgtgtaggaactgacaaagccctgcacccgatcggcaaaacctttcagcattgtattgacccgccattttccatgcttatcgagaagcgtgagatagcattcatcatgatcaaaagaaagctggtcaacagaattatcaatcgcaatcatatacggctccataatgaccgcgttgcgcatggtcacacccatcggcattgaaaactgtaaatcatccatcgtcatatcatatgaaagctcgagagggacaagaccgccctttttccaatccgtttctgtaaacgcattcatatttcggccgtcttccctcagcaggatgcctttggagattaccgtgaccgggtccggattcatcgggtcatcgagaatgttcaatgaagcaagccggcccggaccgatcacaccgagaaagtcgtccatctgataatacttcgcgatattaaaggacgccatattgtaggcatcgatcgccggaactccttcctccaaagcgattttgattaattcattcgtcatgccgcctttataaaaatgcggcgtcgctccatccgtcgtgtagaagaaatgatcataatgccggaagcctttttgatggagatcctgcaaaatcgttcttaaatcagggcggatggatgaatgtctgagcgaaacatagtagcccaattcaagccgtctcatcacctcgccgccattcatcgcctcgtggtcggaatccgctccgaacagtttcatcttcgtcagtgttttttcagaggctccgggaaaatgcccttctatccgcttgcgcagtttctttgtcgcctgcatgcaatgaagcatcaagtcatcgccgtccatgaggcgcggccatccggtcaattctccgccttgaatgacatccgggtgctccatccattgcttgcggacatcaaaagaaagaagctgatcctcattcagcacttcagtctgcagatcatatctggaccaccagaaatattgcaccggctgttttttcagttcctctaatatagtaagcgctttctttttaccgctgtgcaaaagaaaaaacaagttatcattaacaaacgtcgttgttccgaattgagacacatattcggcgagcgtttggggattatatatttgaaaaggatgtgtatgcggttcaatgtaacctggcacaatgtattttccttcacaatttatggtatgaatgtgctctgctgcatcaggaagctcatgaccaacatatacaattcggtctccataaatccagacattctttttcagccattgttttaaaaaaggatttaatacgagagcatcccgtaaaagtagcgttggaagcagctttgagtctacaacatccgcctgtgatctgatgtctttatttttccagttaaaggtacgttcggacattcacatactctccttcgcttatattagacccatcgtatcacatccgcacaattatcgcacggctaaaacgttacaaattattgaagatgaatgaaaaactttttctaagggagctgaaatgatgaaaccgaatatcagtttattaaatgccgttatgcgcatcacttgcggcctcaccattttgtctgctgcgtcagcgaaatacacgagaaaaccttggtgcaagatgcatctcttctgtatgataatgggcgcgatgaaagcggcgtccggcatcctccgcttctgtccggtgacatatatgttccaaaccggaatgaatcaggatgacagccatcagcaagaaaaataacaagccgtttcggcttgttatttaatttctcctgtcccgcgagtctgagaagaatccgtctatacgccggaagacttcatcgatgactgagtgtcacacggcaaaccgacagtcttagtcgtcttttcagaagaaaacccgcatcttatatgacacggggttttcctctttatcgctgcgatgctttcagcgcacgggcgccgatgtcgcttctgtaaaacagtccgggttttgtcagccctgaaacggcgctgtacactttatctctcgccgcttcaaatgtctccgcaaatgccgtgacattggcgacccggccgccgtttgtaacaaattgtccgccgtcttttttcgttccggcatgaaaaacggcgatcccgtcttcagcggacgtcaaactgccgatcggcgtcccttttgcatagccttccggatagccctcggaagccagcacaacgctgacggcggccgtatccttccaccttaggtcaacatccttctcatgcagcagatccaaaagcacctggatgaggtcagattccattctcggcacgacaacctgtgtttccggatctccgaagcgcgcgttgaattcaatgacttttgatccgttttccgttagaatcagccccgcgtacagcacgcccgtgaaggaacgtccctctttgaccattgcttttgccgccggcttcacaatcgtttcgactgcgcttctgacgatatcatcggaaatgtgcggcaccggtgagtaggcgcccattccgcccgtattcggccctttgtctccatcgaaggcgcgtttatgatcttgagcgattaccatcggatagacggtctccccttttacaaacgccattaaggaaaattcttcgccggcgaggaactcttcaatgacaacggatgcgctcgcctcgccgaatttctcatcctcaagaaaatcgtgcaggcattcaatcgcctcttcttccgtcatcgcgaccgtgacaccttttccggcggcaagtccgtccgctttaatgacaatcggcgcacctttttgctgcacatatgctttcgcctcttcaaatgaagtaaacgtctcatactccgccgtcggaatgccgtattttttcattaaatccttggcaaactgtttgctcccttcaatgattgccgctttttcagacggtccgaaaacaagcagtccggctttttcaaactcgtcggctatcccttcaatcagaggaacttcggggccgataatcgtcagcccgacatgatgttctttcgcaaacgcaatgagtgcggcatgatcgctttcttcaatgttgaccagcgtcgcgcagtctgccataccgtcatttccgggcgcggcgtacaccgtgtcaacaagcgggctttgcgccgctttccaagccaatgtatgctctctgccgccttttccgataatcaatacattcacgcttcgttccccctcttaatgtttgaaatgtctgatgccggtgaataccatggcgatcccgtattcatccgcttttttaatcgaatcttcatcgcggaccgatccgcctggctggataatcgccgtgacaccggcttttgcggcttcttcgactgtatccggcatcgggaaaaacgcgtctgatccgagcgcgctgccttttgctttttctccggcctgctcaatggcgattttagctgaaccgacgcgattcatctgccccgctcccacaccgaccgtcatatggtcttttgcaagaacgatcgcgttggatttcacatgtttgacgactttccaggccagcttcaaatcttcccattcctgctcgctcggctctctttttgtcgggatgctgatgtcggcgtcatcaaatccatggacgtctaaatcttgaatcaaaagaccgccctgtacggatgtcagctgtttttctttcttccctgatgcggtcacgtcaagagtgagcagacgaaggtttttcttcgccgtcagtacgttcagcgcttcttcactgaaagaaggggcgataatgatttctaaaaagatgccgtgaagggcttcagccgttgcctgatcaacttcacggttcagcgcgatgatgccgccgaaaatggaggttttatcagcttcatacgctttattgaatgcttcctcaattgaagctcccgtaccgactccgcacgggttcatatgtttaacggcaacagctgcgggttctgtaaattcccggacgatttgaacggccgcatctgcgtccttaatattgttgtaagaaagctctttgccgtgaagctgttttgccgccgcgatggaaccggagacgggaagtgcgctttggtagaaaaccgcctcttggtgagggttttcaccgtagcggagcgattgttttttctcaaatgtaacggtgaattgctcagggtctttctcatcggcctcgcgtgttaagtaatcagcgattaatgcgtcgtatgccgcggtatggcggaatactttggccgcaagctcgcgttttcttttaagagaaacgccgccgtgttctttaatctcattgagcacggaactgtaatcggccggatctgtgatgaccgtcacatcctgatggtttttcgaggcggcgcgcagcatgccgggaccgccgatatcaatgttttctatcgcttcatcgtatgttacgtcttcttttgaaatcgtttctttaaacgggtaaaggttgacgaccacaaggtcaatgggggcaatgccgtgctcattgatctgcgccatatgctcttcattgtctcttacggcaagcagtccgccgtgaatattaggatggagcgtttttaaccgtccgtccataatttcaggaaatccggtcacttctgaaatgccgatgacatccacaccgttttcctgaagaagtttttttgttcctccggtcgaaatgacttcgacgccgagctctgtcagttcccttacgaagggtacgagatttgttttatcagaaacactgattagtgcgcgtttgattgtcatgccttttcacctctgttatttagtcccagcagccgcttcacaacgctcggataccatttgtgctcaagctcgtgtattgtatgctctatgtcttcaagcgtatcgttttcctgtatttcgaatgctttttgcgcgataatcggtccggtgtccatgccttcgtcgacgtaatgaacggtaatgccggccactttcacaccggcccgatacgcctgtccgacagcgtcaatcccagggaatgccggaagaagcgagggatgtatattaataatgcggcccccgtatgcttcaagcagcgtatctccaatcagtctcatatagccggcgagaacgattaattccgccccgtgcaggcgcagctgttcaataatggcccgttcaaaggccgctttgttttcaaaagatgacggttcaaaggcgaatgacgggatatgtaaagcctccgccctttccgccgcctttgcctgaggcttatccgtcacgagaagcgagagctccgcatcccacttctcttctctcatgcgtttggcaatggcctcgaagttcgatccgtttcctgaagcaaataccgcaaactttttcatgaaagagccgcaccgccgaaagaaatgccttcgccccgcttgacccggccgatcagataagccttctcgccctgagcttcaagcgtgccgatgacgtctgtcaggttttcttctttaacggcaaggacaaaaccgatgcccatattaaaaacattgaacatttcttcttctttcagcttgccgtgctcctgcagaaacggaaaaatcggcgggatcggccatgatccgtgatcaatttccgcgctcaatccgtccggcagcatccgcgggatgttctcgatgaatcctccgcctgtcacatgcgccatgccgtccaccttaccgcttttcaccgccttgagcaccggcttcacatatattctcgtcggttccagcaattcttctccgagaggacgcgcaaacggttcatagacagtatccaaatcaagtccgccgtcatcaagaagcacttttctcacaagggagaatccgttgctgtgaaggccgcttgaagtaagtccgattaagagatgcccctcttcgatatgttcaccggtgacgatttcgtctttttccgcgacgccgactgaaaagcccgcaatatcgtattcatcagacgtatacagccccggcatttccgccgtctcaccgccgataagcgctgatcctgactgctcgcatccgtccgccacaccctgaacgatctgctcaattttcacaggatcggccttgccgaccgccaaataatcaaggaaaaacagcggctccgctccctgggcaagcacatcgtttacacacatcgcgaccgcatcgacgccgatcgtgtcatgcttatccattgaaaatgcgagtttcagcttggtgccgacaccgtctgttccggaaattaaaacaggcttttgatacggaagctctgacagatcaaacattccgccaaaaccgcccaggcttcccataacgccgagccttttcgtgcgctccacgtgttttttcattcgtttgacggcttcgtatccggcttcgatgtcaactccggcatttttataagcatcagacatccctatcactccttgtcaattcgtttctccttaaaaggcagaaagagaaaggcagcctgaattcccgctgcctttatgtcattttcacattttattttgtcagcaccgcttcttttacgtgaggaagcactgtatcctgataaatttccgtcggatatttgcccgtaaaacaagcgaggcattgtccgcagttggtgtcttcaaattttcggccgactccttttaacaatccgtctacacttaagaaagaaagcgtgtcagcaccgatgatctggcggatttcttccaccgaatgagaagaagcgatcagctcctcatgggttgatgtgtcgatgccgtagaagcacggatgagcgatcggcggtgaactgatcttgacgtgcacctctgtcgctcccgcttctctgagcattgtgacaatccggcggcttgtcgtcccgcgcacgatggaatcatcaaccatgacgacccgttttccttcaacaacaccgcggacggcggacagcttcattctgacgccttgctcgcgcagagcctgggacggctgaataaacgttctgccgacataacggtttttaatgagaccgagttcgtacggaatgcccgttgcttcggcatagccgatggccgcagaaatactggaatcaggcacgcctgtgacgacatccgcttcaaccgcggactcccgggcaagcattttcccgaggtttttccgggcgctgtgcacgttaatgccgtcgatattgctgtcaggtcttgagaaataaatgtactccatgctgcagatggaacggttgatattcatggaaaagcgctctgatttcatgccttcatcgttgatgatcagcatttcgcccggctctacctcgcgaaggtacgttgcgccgacgacgtcaaatgcgcacgtttctgaagcgaccacataagcatcgcccatgatgccgattgacagcggtctgagtccgttcgggtcaagcgctacgatcatttctgtttcagtcatgattaaaaaggcataagcgcctttcagcatagacagcgaatttttgatctgatccttcagcgaaaagtgtccgctgcgtttaatcagatgagccagcacttccgtatcggaggaagtctgaaagatgctcccttggttttcaagctgctgcttcaactgtgtggcgttgaccaagttgccgttatgggcaagcgcgaggctgccgttgttttgcgaacggaacaggagcggctggacattttcatatccgcctccgcctgccgtcgcataacggacgtgcccgatcgcgccttttcccttcactttgctcagttcgccgttttgaaaaacctcggtaataagcccctgtcctttatgcgcagtcagtttttcaccgtcagtcgccacgatgccggcgccttcctgtcctctgtgctggaggctgtgcaggccgtaatacgtgatctgcggggcttcttcatgtccccagatgccaaacacaccgcattcttcattcaggcctttgatttcagcaagcatggaatagctcctttccacgcgcgctcaagttctttcgtttgcgcgtgaaccaattgttgtccgtcctgattttgaatcgccagaagtccgtcagccgttacctcaccgatatgaaccgcatcagccgcagctgcttcaaaggccgcttggtgttcttttttgaccgaaacgacgaagcgggattgagattcagagaataataacgccgcttcccctgcaacagtcacgttggcgccaaggttttccgtcgtcatgacgctttctgcgatcgctacgcctaagccgccttctgatacgtcatgcgcggattgaacgaagccttttttaatcgcgtcaagcaatgctttttggcgtgacagctctatatcaagatcgatttgcggcgctttgccgtaaatgcggccttctgtcattttttgcagttcgcttccggcaaactcaggttttgtttcgccgatcacgtatacaagatcccccgcttgtttgaaatgctgtgtcgtaatatgagcggtatcttcaattaagccgaccatgccgataacaggcgtcgggtagatggccgttccgttcgattcattataaagtgatacgttaccgccgatgacgggtgtgctgagaacattgcacgcctcgctgatgccgtcggccgctttttcgatctgccagaaaatttcaggtttttccgggtttccgaaattcagattatccgtgaccgcaagcggttcggcgccggagcatacgatgttgcgcgccgcttcggcaacggcgatttttccgccttcttctggatcaagatataaataacgggcgttgcaatccgtcgtcatcgccagcgcttttttcgtgccgcggattctgagcactcccgcgtcagagccgggagcgaccaccgtatttgtgcgcaccatgtagtcatattgatcatacacccactctttgctggcgattgtcggctgctgcagcaggtcaaaaagcgtctctgtcgcatctttcacttcaggcgcggcaacttccgtttcctgaaactcgcggtagtacgcgggttccgctgacggtttgtggtatacaggcgcctcttccgccagtgcatcgaccggaagttcgcaaacaacctctccgttatggcggaggcggagcattttatcatccgtaacatgacctacggaaaccgcttcaagatcatatttatcaaaaatatcgacaatttcctgttcacgtccgcgttcaatgacgagaagcatgcgttcctgagactcggaaagcatcatttcgtaagcggtcatacccgtttcccgctgcggaatgagatcaaggttcatttcaatgccggagccggctttgcttgccatttcagcactcgaacttgtcagaccggccgcccccatatcctgaatgccgactaaggcgtcgcattggatgacttcaaggcatgcttccaggagaagtttttccatgaaaggatcgccgacctgcaccgcagaacgtttttcttcagatgaatctgacatttcttctgatgcgaaagtagcgccgtgtatgccgtcgcggcccgttttagcgccgacgtacatgaccgtgttgccgacacctttcgcctggccttttttaatatctttatgatcaatcaagccgacgcacattgcattgacaagcggattgccttcatagctagcgtcaaactgcacttctccgccgaccgtcgggatgccgatacagtttccgtatcccgcgattcccgccactacttcttcaaacaagtacttcacacgaggtgaagtgagctcaccaaatcgaagagagtttaatacagctatcggacgggcgcccattgagaaaacgtcacggatgataccgcccactccggtcgcagcaccctggtatggctcaagcgctgacggatggttatgcgattcaattttgaacacgaccgcctgattgtcaccgatgtcaacgattcccgcgccttctccgggaccctgcagcacgcgttcgccgctagtcgggaatttgcgtaaaaccggttttgagtttttatagctgcagtgctctgaccacatcacggaaaaaatcccgatttccgtgtagttcggcaatcttccgataatagattcaatgagtgcgaactcgtcatcactgacacccatttgctgatagagtttctcttcttttatttgttctttacttggttcaagcagtagcgacatgagtttccctccaatttttcacgatagaccggaacaatgtaagaccgtctgcgctgccgagcagttcatcgactgcgcgctcagggtgaggcatcatgcctaatacgttgcctttctcattcacgacgccggcaatgccgctgacgcttccgttaatatcgccgccgtatgtgaaggcgatttgattgttttcttttaatctttcaagcgtttcgtcatcacagtagaaattgccttcgccgtgggcaaccggaatcgtaatcgattgtcctttttcataggaagatgtgaataacgtatcgccgttctgtacgattaattcaaccgggcggcagatgaactttaaatctttgttgcgtctcatggcgccgggcagaagtccgagctcctgcagaatctggaatccgttgcagacgccgagaaccggttttccttcggcagccgcttttttcacggccggcatgatgtttgcgaatctggcaatggcgccgcatctcaagtagtcgccgtatgaaaacccgccggggatgagcacgccgtcaaatccgtcaaggcttgtttcctcgtgccagacatactcgacttcttcgccgagttcgtcctttacggcgtgaaacatatcaatatcacagttggagccgggtaacacaatcaccgcaaatttcactgtgcgacaacctcctcaacttcatatcggtagtcttcaatgactgtattggcaaggagcttttcacacatttctttcacgagcgcgtcaagatcgcggtcagatttttcgatcgtcagctccatgtattttccgatgcgcacatcctgcacttcattgtaggtcatgctgtgcaatgcatgctgcactgcgcttccttgaggatcgagcacactttcttttaagctgacataaactttcactttatacattatgaaatgcctcccagtcttttgaaaatctcttcatatgcgtcggttaagcttcccaggttccgtctgaacaaatctttatcgagcttttcgtttgtgtctttgtcccacagacggcacgtgtcaggagaaatttcatccgctaaaagcacccgtccctctgcgtctaagccgaattccagcttaaaatctattaatctgacgccgcagtcttcaaaaatatgctgaagttcttgattcacctggtttgtaatcgatttgatcgttttgacctgctcaggagccgcagctttcaagagccggatatgatcttctgtgatgagcggatcacccagtgcgtcatccttgtagtaaaattcgataatcggctgcggaagctctgttccttccgggatgccgagacgtttcgacatgcttccggcggcaatgtttctgaccacgacttcaagcggaatgatgctcacttttttgatgagctgctctgattctgaaacacgctccacaaagtggttgtcaattcctttggcgtgcagatgtttgaaaatcaggcttgaaatttcattgttcagacggccctttccgctgatctccgcttttttctcaccgttaaaggctgttgcggaatccttgtagaccacgcggagaatctgttcgtcttcagtttgataaattcgtttcgcttttccttcataaagaagattattgttcacaatattcacggaaggcctcctaacccgaatgttgggaatattcaatctgcggcggctgaagaagccgcctccggctggcttcttctataaacctaaacgctcaaagatcaagtcgacgtttttcagatgataattgtagtcaaagcaatcggcaatctgttccggtgtgaggcgggacgtgattttttcctccgcttcgacaagctggcggaacggcacttgtttttcccaagcttccatcgctttcggctgaaccgtgtcatatgcttcttcacgaggcagacccgtgtcgattaaagcgagcagcacgcgctgagaatagattaaaccgagtgtgcggtccatgttgcgtttcatattttccgggaataccgttaagtttttgacgatgttgctgaatcggttcagcatgtaattcagcgcgattgtcgcgtcaggaagaatgatgcgctcagctgatgaatgagaaatatcacgctcatgccataacggtacattttcgtatgccgtcagcatgtacccgcggatcacgcgcgccatgcccgtcatattttccgacccgatcggattccgtttatgaggcatagccgatgagcctttttgtccttttgcaaaaaactcttccacttcacgtgtttcactcttttgcagaccgcggatttccactgcgaatttttcaatgctcgtcgcgatcaaagccagtgccgccatgtaatccgcatgacggtcgcgctgtaatgtctgagtggaaatcggcgccgctttcaggccgagtttttcgcagacataccgctctacgaacggatcaatatttgcatatgtgccgaccgcgccggaaagcttcccgacttcgatcccttcttttgcctgcttgaaacgttcaaggttgcgtttcatttcttcgtgccaaagcgcgagtttcaggccgaaagtcgtcggttccgcgtgtacgccgtgcgtgcggcccatcatgaccgtgtatttatgttctttcgctttttcttttataatgtcaacaaatctctcaatgtccttgagcaagatctcattcgcctgttttaatagataggaaagagcggtatccacgacatctgttgacgtcaggccgtagtggacccattttctttcttcgcctaatgattctgaaaccgcccgggtaaatgcaacgacgtcatggcgcgtatcctgctcgatttccaaaatgcggttgatgtcaaaagacgcgttttcgcgcatgaccttgacgtcttctttcggaatgacgccaagctcagcccaggcttcacaggctaaaatctcgacttccagccatgcctggtatctgttttcgtccgtccagatcgcggacatttcaggtcttgaataacgttcgatcattatgctcgtcctccgtctcttttcatccatatgttcgtgatgtcctgaatccatgtttcatcaggcttccgcaaaaatgtcatatgccccattttgcggccttttttaatctcatgttttccgtacaggtacagtttggcttcttttaaaagctccgtatgctcctccgcaagcttcacttcatcaccgagcagattcaccatcattcccggtttgagaagatcggttctgccgagaggaagtccgcagaccgctctgatgtgctgttcgaactggctcgtttcacaaaggtcgagcgtataatgcccggagttgtgaggacgcggcgccagttcattgatcaaaaggtctccgtcttccgtgacgaacatttccaccgcaagcggcccgacaagctccaatttctccgcgagctggacggcaagcgcctctgcccgcttttgaaccgtttcctccgctctcgcgggcacgatgctttggaacagaatattatttttgtggatattttcagcagccggaaaggttgaaatctcaccgtgcaccgatctcgtcacgataacggaaagctccatccggaacgatacccagctttccagtatgcacgtgccgttttctagcagcgcggccgcttcgtctgtctgtccttcttccttaatgacaaattggcctttgccgtcatatccgccgcggcatgttttcagcacagccgggagccccagtgcctgaacagcttcctcaagctcccgtccgctgtttacgatccgataaggagcgacttgacagcctgctgactggatcgcctttttttccgtttccctgttttgggtgatgagcagcagctcgcttccctggggaagatatgcatgttctttgagccagttgagcgcctcgtaatcgatattttcaaattcgtacgtaatgatgtcactgactccggccaatttttgaatcgcttcacggtcattatactgggcggtaatctcaatatcggcgatctgtccgcatggcgagtctttcacgggatcgacgactgcgactttatagcccatctgttttgcggcgacagccatcatttttccgagctgtccgcctccgataatgccgatgacggcgccgggataaatcgtttttttatcagacaagctgatcactgctttccagcaccgtttgttttgtcgcatttcttctcgcctctagtttatccgcaatgtcaccgtcaaatgccgacaaaatctgcgcggctaacagacccgcgttcactgcgcccgcttttccgatcgccgtcgtcgcgaccggcacgccgccgggcatctgtacgatagacagaagagaatcaagcccgttaagcgatttcgtctgaaccggtacgccgatcaccggcagcgtcgttttggccgccgtcattcccggcagatgcgccgctcccccggctccggcaataatgacttttaagcccctgtctctggcgctttctgcatattcaaacatcaaatcaggcgtccggtgcgcggataccacctgtttttcataaggaatgtgaagttcgtcaagtatgtcgcatgcatgtttcattgtctcccaatcggaggtgcttcccatgatgattcctgctagcggctgcattctgttcccaccttctcatgctttgtttttcagaaaaaaaagcccggcttatattgcaactatgaggaagcaatacaaaccgggcatggcgcgcgtatcgtcagtcgttcgcttctgcgatatccatgtcagctgtttatcactttcctgcatagtccggccgtttacggcagccgggtagaaacttatgggccatattcccaagattatatgaggtcgtgttttgatttcatgtttatcttaacaacggacttggataatgtcaacgacattatcgaacgatataaaaattctttcttttaatgttcgtgtttagatcaatttcccttcaaatacgatttttttcccgcaaggaacgacttgaattgatccattttctttcttttctgtaaagatcggctcttccatccgccggacgggcatatagccctcttccttcattaaagtgagaatggtgtcaatcgtttcgtcttccgttacttcaaaccgtttcttttttggctttgtcattccttaattctcctcttcttcactgctttcacccagaatccgccatggatcgttttcggctcaaaagcgatcataaacgctttttcatcaagcgttttaatcgtatcataaagctgaagctcatatttgcgcggtgtcagtatctgcatggcggtccggtctccttcaagtcctcccgcaacccagcttgtaaccccgtatcctttttcccggagctgtttcggcaggtccagatcgagctccttcgtaatgacgttgactgtaatatagccgagcgccagtttttcttcaattttcattcccactatgacgccgagaccgtagccgagtgcataggcaatgacgttttgaatttgattcagattgccgagcacgagactcaggccggtcacatacacaaggatttcaatcgtactgatgcctgcggcgaaatagcgctgtccctttaatgtcagaatcatcctgatcgtaaagaaagagacatatataatgttaatgatgagaataatgagaaccatacctatactgttggataaaatcgtctgcatcattgattccccctcctctgataatttgaaaagccaatctttcaattaaggatagtttaccctcttttgatcattttcaaaagaaaaaaaagcccgccccgcaaggcagactttcaagctcttatcagtgaagctcggcttttttcaatcgtttgacggcttcatattccttttcaagctcactcagcgtgtatccggacagttcctgaacatggtcttgataaaaccctgagcggatcagttttgtcctcaggtgctgttttttccgattaatggcttctcgcaacaacggggccatcttcatcatccctttccgaatcataaagagtagtgccgctttcgaattgctgttgctctcatcatatctcggccgggtcttcaaaacaacacgctttattagaaaaatttgtaaacattgtgaaagacaaatttcgacttataaagggatcagcgaagcagtaaagtactctgaaatgagcggccatgtcacagccgtaaaaatgagcatgatgatgaccgccgcggaaatacagtacatcacgtcagccgcaggcttttcagccgatttgtaaagaatctgcacaaattgcaccatcgccgaggcggccagaaacaaggtcagcgccgtaaacaccacggtgatgaccggcagattcaatatcgcgaaaatcatccacacgatagagcaggtgacagccggaaccaaaagcgatccgacccccgcggccgcatcccgcatcgtgattttctgtttcatcatataacgtgatacaagccagaccgccccggccgcagcggcaaaaaagacgagcgtatacacgagaacgacggtaaagccgtcaaaaaacgtatgatgccgctctccgtatccgagaggcctttgctggcttgccctcagctgaaaccaatttccgattgagaaaaagatactgaacacaagcattgaaataagagcatatttaaagcgggaaaagccgtcttccccaacgaccttcaccggtgatgtcaaaatgcgcagcgcgaaacggcaataacgtttgaccgcggcccatacagaagcgagtttttccgtaaaagcccgagccgggcgccgttccttttctttcttcttttgcttttgataacgtcccgcttttctggacattctcgagagcggttcttcatcagttccctgatgctgtttttcttcttccaacgtttcttttctttcttccgtcatgtcagcaactcctatcaaaaaaatacggcggaatttgttaagcaagaaaataaaacacttatataaggtaccgaagcgtccttaaacagtcaagcggttttcttcacccggacacccacatgacgttttatagtatgtattggttttacggaataggacaaaaacaaaaaaccggctgaactcagccggtttttccgttatttcaagaagatgaaatacaggataaagatgacgaacagcccgtacataatcggatgaacgctttttccttttcctttgcagatcattgtaatcgggtagaatataaaaccgatcgcaatccccgtcgcaatgctgtacgtcagcggcatcataatcatcgttaagaatgccggcacagccacctcgaatttatcccaggcgatcttaccgagcggcgccaccatcagcgcgccgacaataattaaagccggagccgtcacattcgtggtgacaactgacagaagcggcgagaaaaacatcgccagcaaaaagagaatgcccgtcacaacagccgcgaagccggagcgcgcccccgccgcaacgcctgagcttgattcaacataagaagtcgttgtagacgtaccgagtacggctccgataacgattgatgtcgaatccgccagaagcgctcttcccgcacgcggaagtttattttccttcatcagcccggcctgtgtcgctacagccaccagcgttccggccgtatcgaaaaacccgacgaacaggaacgttaaaatgacaatcagcatttggacggagaagatatccggaagatgcatccacgcctgtccgaaagtcggcgcaagactcggcacgctgccgacaatgtgcgtcggaaccggaatcagtccgcagaccatgccggcaaccgccgtcagaagcattccgataaatacgccgccgtttacgcgaagcaccatcagaatgaccgtcacaataacaccgaaaaccgtcagcagcacagggccgctgtgaatattgccgatagacaccaaagtcgatgagttcgcttcaataatgcccgaaccctgcaaaccgacaaatgtgatgaacaaaccgatacccgcgccgaccgccaatttcagctcaggcggaatcgcattaatgattttttcccgcaatcccgtcagcgaaagcgccacgaagataattccggaaatcaagacgccggaaagcgcggcctgccatgaaatccccatgccgaggacgacagagaaagcaaaaaacgcatttaatcccatacccggcgcaatcgcgatcggatactttgcaatgagccccattaaaatacagccggccgcagacgccaaggctgtagcggtgaacaccgcgccctgatcaatttttaatgcttcgggaaatcccttcacaccgtttaaagacaatgtcagcggattgacgaacagaatgtacgccattgacaaaaaggtcgttaaaccgccgatgatttcattacgatagcttgtccccagctcatcaaactgaaaaaattgcttcaagccaattgcctccttcattctctcccatttattctgcccgatatccgccaaataaaaaacgccccaaatacatttgggacgcttgactacatacgttcagtctgaataaataagaatggattatttatatcaaacgattgagattgatccgtagtcaagccatttacggtagcttggtagaaacttgcgggccatatccccgccattatacgatatctgcatatttgatttctgagtctattgtatcaattcaattttgaaaactcaataaaaaaaacgaacaatcccgttaaaaaaatttggtttattcgttaattgaccaaaaatggaagacggcaaaagccgccttcctgacatcattttccgtctgcaggccagaccggcaccgagaatgtgattccgctgtcatcggccagcaagttcataaccgtttgattgacgtacaaagcatatgaatcgaatgaaaaatcgcgcaatgaatagtctttattggttgaatcatccaattcaaaaacggattccatttcacccgttttaaggttcgtgactttcgccttattccctttcagataatagcctttttcatactcattaagcgatggccaggttttcatttttttcgtattgccgagaccgatagactcaccgacattgatcagctgatctttatccgttttgctgtcattaattcctgtgaattgataatcgacgatcacccgtctgccttgctgtttgatctttttgatggtaatgccgacatgatgatgtttcgttttatagctggcgggcagttttgttttcagagggacgatttctcccggctctgattctgattttaaattacccgttatgaaaagtgttttcgctttcgggtctatcggtttgctgaattgagtttggccgcgtattcttttcccgccgccgggaaggttctttctgctgccaagttcaatattcgacatcgtcatttcataatggtttccagcatcatccgttgcttcgtcaatcgagatggcatcatttttagctgcatcttgaaagtcgactgaatacaggagagccgatcccatcgttccgttttccgcccggatatcgaaaaagcggtataacccgtttacattcacagctttcgtcccttcaagagaaacggacttttgttttttaatcgggagtgtaaagcgccagtttccgggaatatccttgatctgtgtaatgacaagcggaagcttatcaccgtctttcatctttgggccgtccgcaaaaaagcgaagctgccccccgtactgcccgtctttcatttttttcatgccctgactgtcataatccaaagataatatattccggatgtctttataatctacttcaaaaggaatatcctcctcatcagatttcaaattgtcaacggtaaaattgtaaacgagctgtccgctgtcgtaatacacacttttcactgtcaccgtgattccgcgtgattctgctttctcattcagttttgtcaccaaattgcttttaaacagcgcagaacctgccttatcctgaaataccctgtaaatctgcccggcaacagggatgtttcccatagccgtattaacggagggtatgaataagcctgaggacaaatacagaataaacaaagcggcagcaaccgcgagtccgtttatcacttttcgtccccatctccgtctgacggcgccttcttttccggcacggacagcggcgctatgtatcacgtttttcaattcagctttcggcacgtcaatgtcctgatacaattgcttcatttgatgcttttccatatatgtttatcctccttttccagctcctgcttcaatgcttttctcgccctgtgaagatgcgtttttacagtgccttccgccataccggtctgttcagcgatcatagcaatcgagaaatcttgaaaataataaagctgaatggtcagctgtatatgttcgtcaagggtttccagggcattccgaagatctatgtattcttcaatgttcttattctccgcgcgcgtatcatgttgcggctcaaacggaatgacgtctccgtgctttttcctcatcgcaaaaatcgtatgaagcaaaatccggatcagccacgttttaaaatatttcggctccttcagctgtgcgatataaagaaaagccttgtaagccgtttcctgaacagcgtccagtgtatcttccttgtgatgcaaatagagataagctgttttatataaagtatcctggtgtgctgtgatcagtttttcaaaggctgcggcatcaccttttttcgcctttttgatcaatcgttcttccttcaccttatccacctcctatgctgttagatatgaatcagggcaaaacggtttcaaaaagatgaaaaaaaacgcctcttttttaaaaagagacgttttttatcttcatttattcccactcaatgttctctaaacagtataagagttctttgattaaagcatatcttgatttctgttatttgtaaattgtttgcactcttttacaatgatactttttatttgtggactttgtaggaaatcttaaatatgtaatcaaaacgaaaaaaaccttaacgactacttttttaggctaaagataatttagatactcatcattccattcaaccatttgaaattgactctgaccgattaaaaatgatttcccgtagatcatgctaagtctcatagaaacttgatttctaatcataaatgttaaaagaaatttaaaaaatttgatgatataatttaaaagtagagaaatctacctttaaattatagacaaagtggggtgtttttttgcaattagatcaatttaatagagattcgctatatagtaaagcattggagtattggtatgaagaatggaaatctttaatatcacaagtgaaaaatgggacaataggaattgatatagttaatattcgtcttgtgttattggatgtgattaatgaatatgaactaaataaatttgagagtgacaacaatcgtaaagtttatataaaattaatcgaaaatcttattagtgaaagacatatgaaattatatagagatgaattactcattttaaaagggaaattggaaaggaaagatagtcaggcagtttatgttattgctaaggaactttctaaaaaaatttctaaagcaaattttgcacaaatattatttgacgaattattagaaattatcgaaaagaaattattcttaaaaaaagatagaactaaaattaaaaatttaactaaggatatcattatagacttagtaacttcagggaaaagtgtgaaggatatcgaaaacttactcagtgacgtattccaaacatataatgtaaatggagaagatatctttattcttttcaaatatactcctgctggcttgtctcctgaacaagccaaagtatatattgataatttaagtgtaaaagatagattagagatatttagaaaaaatttaatagcaaagaaaagtgactatctttttatatttcctgtatggggaatgattgcacctcctcttaaagatgaaaacgatacaatatttggtttttatgtatatgatccagtccgagaaaaaaaaactccagatgccgaattgtttgacgaaacgtttaacacaaaaaaacaagaagaagttgttgaagatacatataaatttgatagtagatgtaatgtactagttaaagtacaggctatttctaataatgtggcgaaaaaaattgcagaagaaaagtatttaatttttttaaggttagcaaatttgaagtttgctagcaagtttaaagagtttttttgggatggacagtatataggaaaaaatcttgatagcgaatctagttttggtactgcatttagcttaggtagagatgacagagtttttagaagaaaactcagcaaagataatccagtttattttagtaatgaaaagtttaaacaaatgaaagattattctaaggtaattgatgcccttgaaaaaaggaatatgttcattgaattaaattctattattaatgtaattgaattgatgtctaattctatttgggaaaccgagaacaataagctgttgaattattggatttgcattgaaagtttagcaaacatttcaaaggcatataatgaatctaaatttacttttattaaagaagcaatatcaaatatgtattttctttgggaacaatttagaccaattcataatctctttttattaactgtaaagtatactgaacactcatttagaaatgatgattccatcaatataccggaggaatttgcccatgatgttggcatttaccaagcgcggtctgaggactcagtagtttcactggttaaatttcacaaacggatgaaggatttattgtcttataccacaaaagaaagctttttagatagtattgaagatactcttgatttttatcaaaataataaaaaggctttacagatgctccgaaacaaaaaagatgaagttaagttaacaattgattatatatataagtctagaaatcaaattgttcataatggttatgtagcaaaaaaccttataccttacttagtaaattttgcagagagttatgcagagtcattattccagagaattatagacgtatatcttgaagatgaatttgatcttcagaactattttatcaaagaacaatatgaaggtgttttattggaaaagaagctttcaagtgagacttttataaaattggtttagaagaataaatttattttttgaaaaaacaagagcttagaacccttataaaccaaggattctaagcttcttttgactattcccactcaatcgttgcaggcggcttgctcgtaatgtcatacacgacgcggttgatgtgtttcacttcgttgacgatccgtgtcgaaatcacttcaagcacatcccaagggatacgcgcccagtcagatgtcatgccgtcgattgatgttacggcacggataccgattgtgtaatcatacgttctcgcatctcccatgacaccgacgctgcggatgtcaggaagaaccgtgaagtactgccagatgtcgcgctctaggccgtggttcgccacttcttcacgcagaatcgcgtctgattcacgaacgatctcaagtttttcttccgttacttcaccgagtacgcggatgccaaggccagggccagggaacggctgacgccatacgatatcatccggaaggccgagctccgtgccaagcgcgcgcacttcgtctttgaaaagggtgttcagcggctctatcagttcaaactgcatatcttcaggaagtccgccgacattgtgatgcgatttgatcgtttgcgccgttgcagtaccgctctcgataatatccgtgtaaagcgttccttgcgcaaggtaatcgatgcctttcagcttgtccgcttcatcatcaaacacgtaaatgaattcgttgccgatgattttgcgtttttgctcaggatcagaaacacctttcagcttgtttaagaatctgtctttcgcatcaactttaatgacattcatattaaagccttcgctgaacgttttcatgacgccttccgcttcgcctttacggagcaggccgtgatcgacgaaaatacaagtcagctggtcgccgatcgctttatgaattaaagcagccacaacagaggaatcaacaccgccgcttagcgcgcaaagaacctgtttgtctccgactgtttcacggattttttgcatttcgatttcgataaagttttccattgaccatttgccttcacaatcgcaaacgccgaatacaaagtttttcagaagatcattgccgtattcagagtggcgcacttccgggtggaactgaacgccataccaattcttgtccgctttgctcatcgctgaattcgggcagtgatggcttgttgcgtcaacagtgaagccttcaggaacttctacaaccaaatcgccgtggctcatccacacaacctgttcttccggaagatccttgaacaagtcaggagttccttgaatctgaatgttcgcttttccgtattcgcgctggcttgccgcctcgactttccctccgaggtaatgagtcatcagctgcatgccgtagcagatgcccaatacaggaatatcgagttcaaagattttttcatcacagcggaaagatccttcatcatatacactgttcggtccgcctgaaaggataattccttttggattcatttctttgatttcctcagctgtcaacgtatgggggtgcagctcgctatatacgccaaattcacggatccggcgggtaatcagctggttatactgactgccgaaatcaagaacaagaatcatttcattcactaacttcgtcatggttgtcacctaatctcctctaagtttttgacacagaaaaaacggaggacaaacgttcagccctctgtcgcgcaagacttgtacggaagcccggctttttaacgctcccgggctcccatttaacattcatttattctaacaacaggacgatatgcggtcaagactatcttgttttaattatattttcccacaactgtcctgattcattccaaagctttgcggcattatccctgcggtataaggcccgctcatagcgcaacgtcagctcggacatgtcgtttgtatggtgcgcctcgtcaatcctcgcagcaaaatcgcgcagtgtttctccgtctcccctgctgaaaccttttcgtttcagctggcggagcagcgcggcatatgcgtcgaaaaagacgtcttcatccgtgcgccgcttcaatctggctgctgtaacgtgcggaatccagcgcgcccggaacagccagacgagtgccgccgcggctgaaatcacgatggcgatggctgcatacggccacaggtgtgccgcggttttgttgcggatcacaggatgcggtaccgcgctgtgatcccgctttttcggtgtttcttctttttccggctttgtttcctgacgctgcttgtcagacggtgcatccgaattccccgctgagcctccgctgtcttttgccgcggtatgattttgctctgacgtaaactccgtcggattggtgaagccttttgtcggctcaaacgtcacccagccctgatcgggaaaatacacttctacccacgaatgggcgttgttgtttgtgacttcataaatgtggccgttatggtcgcctgcccctttatattcgccggatgtatagcccttcacccaacgggcgggaattcccgcggagcggagcagcaccgccattgccgatgaaaagttatcacaatatcctcttttcgtttcaaacagaaattgatcgacataatcctgattgtgctccggaaccgcgacatcctgtgtattatacgaaaatgcggaagatccgagataatcctcgatcgccttcgctttatcgaacatattatgatgatcccgcgtcagtctgtccgcaagctgtctcactcttttcggaaggctgtcggggacctgtaaataccggtcattgaattgattctgctcacggtatcgtttcactttcacttttctgagatcattcagcttaaagacgggcgcctgaaaggtcaccgtgtaccttcccatattgcggatgttgcccacttgttcactgaccggcgtaatttgctcggtgtttccgttcatttcaagctgaatcgagtgcttcggtttaatattggagacgccgatcggatacatgacgtgattatagagataattctcatcaatggacacctgtgccgtataccgtctcgtctgcacactccggtcaaaccatatatcttccacgttgccgccgttcagtttataagacatgccctgatcggtctccacccagcctttccccgtgtatgtatccttcgtttccacccggaagtacgcccgttcttttcctttccatgtaaaaaccggcgtatcatcctgctgaaaaggaccgcccaatgtttcatcatgattgccgtagccgattttgctttcggcggcgggcacttctttgtggtttgttatttttttaagaaacggcacggggtccggccagttcgggtctgatttcggagcagccagaccgaacacgacggaagcgcagataaacagcatcagcggcagaaaccatttgagtatcaatctttttttaaacgctatatgttccgtaagccggatgcgctccatatacaaaagccccatcatcaaaaagccgataaagacgatccggatgacggcgtacgcggcatcatagggagtaaacgtatcaagcacggtgatatacgctaccgtcatgataaaaaagaataatattttccgctgatagatcacccagtaatgcagcaaatacacgagcagccataaaagcacaaaaaacagcaacgtgcggaatgacgggttcatgtcattccatcttccggacccgatgtggcgggcattttgcatcacgtcccgcaaaaaagaaacgagccattccggctgaaaaaccgaacctttataaaacaggatgtgaatactgatcaacgtaaacagaatgcaggacggcacggtgacgtaccacctcatccggaagaatgacagcagaaatgccaaaccgataaaaacgatgaaaaaaccggtatgttttgtatccgtaaaattgtgcagcggcctgagccattcccataacaataaaaaagcgagaaaataaaacagcagcagactcagcctgcttccctggttctcgtcatgcggcatggcgcgccacctctctttctaaacaacatgggacacccgtttgtccctgatcatttgcaccttaatatttttttgagcgaagatgagagcgagtttccgttctttctccgaaagcgcggcattcgtttctttcgccaaaaacaccgtcatgtcagcacggccgggctcagcctgtttgagaaggtcttctgtaagactgcccgtcacgacggcaatggaagctttgcggacacgcggatccgccagctcttttcctaaacgcccgcctgcatcggcttcttccgattctgaagctgatgccaggtaacgcagcatctttctgaaatgccggtctccctcccggacgggaaatacagtccggtctctccccaatgagataaatcctgcgggagagcccttcacaagcgccgtgtaaagcagggatgccgaagcggataccgcggcttcaaacgatggggacggcctgcagtccaaaaggagaatcatattcacactctgcagcgggtcaaattccttcgtcatcagctcatttcgccgcgccgatgttttccagtcaagtgcggaaaaccggtcgcccggctgataatttctgacgctcgcagccattgcggagcggtgtacctgaaacggagcgccggcagccgcaccctcttccccggaggcagcctgcggcttatagtgaacagacccgtacgccgggaaaaccagaaccgtatccgtaacggaaaacgacgccgtcttgtccaaaagcccgagaacatctcccgtccgcactcttatcgtatgtaaatgatgctctccgcgcggcacctgcggcagctcatattgtaacgtcagcttcctttgaaaccacggaaacacaagctgtttcgcactgcgcctctcgccaagcgtttccggcatcacatcttcaatgaccatatatgtcagcggaaacggcaggcgcctcgccagcctgatggtgacagacagcctgtcgcctgaggttaactgggcggaggacacgtcacgcgtcacctgaaacgcccgcagcgggtacacagcgaccagcccggcgtaaacggtaaacggcaaaaacgcataaaataaaaaccagctcacaaatccgccctgaaacatggcataagaaaagacagccgccgtcagtacggccaacataagcagcttccatccatatagaagccaatgcatcttctttctcattagcggaccgacatcctttggacggggactttttccgtttgcatgatgtcttctataaccgcttccggtgtcacatcgttaaatttcgcctcggcggtcaagatcattctgtgcggcagcgtatacggagccaaatactggacgtcatcaggaatgacgtaatcgcggtcatgaagcagcgcgtacgcctgcgcggctttcattaatgagattgaaccgcgcggacttacgcccagatgtacggacggatgccggcgggtatgctgagtaatgtcgacgatatacgcttttattccatcatccacccgcacctgctccagtttttgctgaaggctgataaactgttctttagaaatgacgggctcgattgtttcaagcggattgcgcccttcctgcaaagacagaacccgaagctcctcctcggcagtcgggtagcccatgcgcagcttaaataaaaaccggtcaagctgggcttcgggaagcggatacgttccttcatattcaaccgggttttgtgtggccatgacgaaaaacggctcagccagccgcattgtctttccgtcaatggtgacattcccttcctccattgcctcaagcagagaagactgcgttttcggagaggttctgttaatttcatcagccagcacgatattccccatgatcggtccagggcggtattcaaattccatcgttttcgtattataaatagagacacccgtcacatctgacggcagaagatccggcgtgaactgaatcctcttaaagtcagctccgatcagtttggccaaagcgcggaccatcatcgtttttccgactcccggcacgtcttccagcagcacatgcccttttgcgagaatggcggccagactgagtatggcgatatcccgttttcctatgatgatgttttcaatatgctcaacggctttctccagcagcggatgcagctcttctttataagccattcttctcctcctagtcatctctcaaatttcaattatcgtaacctaactttaccacaaaatataaacagtataaaaaaacgtttccagcgaattgtttccagtctgaaaaaggaaaaagctccctttagaaaggaagctttatttcagctggagaggctccatatgaacgtgtgaatggtcaatggcatgttcctctttcatcccggcaccttctgctgtacggacgagaaaaaatgtcatattttcttacatcattttcaactgcctgtggcatttatgatagaataatacttgtcggaatattcagcataaacaaaccaaaaggaggcaaagaatgaatcagcctaactctttatcaaagggattaaaaacccggcatatgactatgatttcaattgccggcgtgatcggcgccggattatttgtcggaagcggatccgtcattcattccaccggacccggagcgattgtctcctacgcattagcaggactattagttatttttattatgagaatgctgggggaaatgtcctccgtcaacccgacaagcggttcgttttcacagtacgcgcatgacgccatcggtccttgggccggttttacgatcggatggctgtattggtttttctgggtcatcgtcattgccattgaagccattgcaggcgccggaatcatacagtactggttcccgggcattccgttatggctgacgagtctgcttctgaccgtgctgttaacactgacgaatatttattcagttaaatcgttcggcgaatttgaatactggctttccttagtgaaggtagcgacgatcgttgtcttcttaatcgcgggatttgcgttcattttcggaatcgtccccggcagcaaaccggtcgggctggaaaatctggcgggcagcggcggatttttccctaaaggtccaagttccgttctgctcggcatcgtcgttgtcattttttctttcatgggatctgaaatcgtcgcaatcgcagcgggagaaacgtcaaatccggtcgaatccgtcacaaaggcgacccgctcagtcgtttggcggatcattattttttacgtcggttccattgcggttgtggtcacactgctgccgtgggattcagccaatattttggaaagccccttcgttgccgttttgagccatatcggggttcccgcagccgctcaaatcatgaatttcatcgtcctgacagccgttctgtcctgcctgaactccgggctttatacgacgtcacggatgctgtattcactggcagagcgaaatgaagcgccgcggcgttttatgaaactgagtaaaagaggcgtaccggttcaagccattatcgccggcacctttttctcctatattgccgttgttatgaactacttttctcccgactccgtatttttgttcctggtcaattcatcaggggcgatcgcactgctcgtttatctcgttatcgccgtctcacatctgagaatgagaaagaaaatcgaacggacaaaccctgaatctcttaaaatcaaaatgtggttctatccgtacttaacctacctgacgatcatcgccatttgcgccatcttgttatctatgctgtttatcagttcaatgcggtctgaatttctgctgacaggatttattactctgctggtacttgcctcatatgtattccgcaaaaaacaaaaaccgaaagagagcgcttccgaaagccgggttgcgcaataaccgcaaacaccccccccctcaaaaaagggcgggtgtttttttaaccaacctgttcaaggcagcattaactgtagtacaggatttcaataattgataaggacaggatgaaaaatggcactagaaaaatttgcagatgaactgccgattatcgaaacactccagccgcagaagaaatcagacggcagcacgtattatgaagtcaccatgaaggaatgctttcacaagctgcaccgcgatctcccgcccacccggctgtgggggtataacggtttatttcccggcccgacgatcgaggtgaacaaagatgagaacgtctatattaaatggatgaatgaccttccggataagcattttctgcctgtggatcataccattcaccattcagaaagcggccatcaggaacccgatgtcaaaaccgtcgtccatttacacggaggagcaaccccgccggacagcgacggctacccggaagcctggttcacaaaggattttaaggaaacgggtccttattttgagaaagaggtataccattatccaaacaaacagcgcggggctctgttatggtatcacgatcacgccatggcgattacgaggctcaatgtgtacgccgggcttgccgggatgtatatcattcgcgagagaaaagaaaagcagctgaagcttccctccggagagtacgacgtaccgcttatgattttggaccgcacgttaaatgacgacggttccttgtcttatccgagcggacctgctaccccttccgaaacgctgcccgacccttccatcgtcccgtttttttgcggaaataccattctcgtcaatggtaaagcgtggccgtatatggaagttgaaccgcggacatatcgtttccgcatccttaatgcctccaatacaagaacattttctctctcgctcaataacggcggcaagtttatccaaatcggttctgacggcggactgcttccccgctctgtcaaaacacaatctatcagcttagccccggcagagcggtatgatgtgctcatcgatttctccgcctttgacggagaacatatcattttaacgaacggcaccggctgcgggggcgacgtcgatccggatacagacgccaatgtgatgcaattccgcgtcacaaaaccgctgaagggagaagacacaagccggaagcctaaatatctttcaacaatgcctaatgtaacatcaaagagaatacacaatatcaggacgcttaaactcacaaatacgcaagacaaatacggccggcccgttttgacgctgaataacaagcgatggcatgatcctgtgacagaagcgccgaagctcggcacaacggaaatctggtcgattatcaatccgatggggggaacccatccgatacacctgcatcttgtttccttccaaatccttgaccggcgtccttttgacttagagcgttataacaaattcggcgacattgtgtatacagggccagccgtcccgcctcctccaagtgaaaaaggctggaaagataccgtgcaggcgcactcgggagaggtcatcagaatcgcggcgaccttcgctccttacagcggacgctacgtatggcactgtcatattttagaacacgaagattacgacatgatgagaccgatggacgtcacggataagcagtaaacaaatatcaccccttttagagaaggggcttttttatttatccaaaaagaaaaaataagaagacacttatttgcatatactgtaataacaggaagacgatgcaccctcattggaaatctggatagaaaaaggaattaggagattagggaaaagtatgagacaatgaaggagtgcacgaaaattcataagggaagaagtgactttatgtcttactacaacaaacgtaatcaggaaccgctgcctaaagaagatgtcagtacgtgggaatgcacaaaagaggactgtatcggctggagcagaaagaattttgccggcagtgataccccgacttgccccctttgcggcagtaaaatgatcgacggcgtccgttcgttggtaaatctccaaaacaataatcaaacggcatcaagttagacctcccttttacgagtctcaacatagagaaggcctccatgtctcatgagaggcctttgcgttatcatgcccttttatgatgtaaaggagcaatgaacatgaaaaacgatcggcagcagaaagatctgaaggaaatggcaaaacggcggaaaatgaaccttgccgccagtcattcatcgaaacgcttcattttgccgttccgattctccgttttttcaaatggctcgcctcagccgcagccagctttgttcattaaaaaacacccagcgggcgctgagtgtttttttcatgattggatgacggaaaaactgttgataatgccgttgtcattttcccagactttttcgcattttttcgtatccaaatgataagcataaatggtccggaccttcgcattccgccccgtttcatccttcagacgcttagcgccttttgcttccgccatgaaataaataatgctgccgtctttagaaaactgaggctgggcatcaatcagcggagtgaagtccttcccgtttgagataatcgtttcatcttttttcgacttgacattcatcagacggatggacgctttttgttccgtccctttttgtgtataagatgtaaagacaaggttctttccgtccggtgacaccgccacgtcgctgataaactgttcaaggtttgtcagatcctgaaggtgttctcccgctcctgctgcaaaccggatattcgtcggttcagggtcaatccccttctcatttgcctcatccgttttttgataatcctctttcacggaataatgcagaagcgcaaaatcgttttggctgcggttataaaagaagctgctcacactgtcgtctttctcatcggcggcgggatacagattttcgtaacgtttcgttttcaaatcaaaagatgcgagacggaaaatatcttcatccgcttttccgagacggaaataaatgtgcgtcagatcctttgataaaaacagactgtcagcgcttgccgttcctttataaagcaccgtcttctttttcgtcttcagatcaagcttatacagacgcatctcattttggtcattattcccgacaaaatagagcacctgatgggcgtcatccagcgcaaacgccggatatgccgaaagcttttcctcgtacagcacgcggccgtcttcgtaatatttcgtcatcagatctttgtctgtaatggaaacaagcagcttgtcatggccgccggagacaacggctttcccgccgccgtcgctttttcctttaatcagtaaaacggccgcgatgaccgccgccgccaaaacggcggccagcaacatccagatccatcgtttcttcttcattatcaatctctccgtcaatcagaaaaagcaagaatcagtgtccttgctttttaagatggtctattttaatagctgtagtgtccggatactcttcctttgcttaatggatatccgagcgctttgaacgctttcgggctgacatccaatacggcattcggcatacggcctacatcatttttgtatacggtaataacctttttcggttttgctttcgcataagctctgattttcgttccgtttctcggaacgtcaaatcctaattttgtcgcgcaatcccagtgtcccagttttttaccggaagatccttttttaccgactccattataccatgtaatatttccgttcacttttttagcacttgcatcagaagagtaactgatcgctcccagcgtgcttcctgctaaaatcaataaggctaagaataacttcttcaagctttcgtcctcctgattctttattctaggcaaaattatacaccaagaagacgattataatatttcaatcactttacatgttcattacaacgtgatgagacgtgcacataacgacggcacaatttcctgttctatataattccatggtaaattatactacaaaatttaattcattagcgttataatattcatagagtatttctgcattcaatatggactttttataaggcctattgatagttgcataatatgatatattttgagaaatcaggctttaggaagcaggcactttattccttttaaccgtggttcatattgatcatgtacctatactcgtttcaatcagactaggagtgataatcaatgaaagcggcaagatggcacaatcaaaaagacattcgaatcgaaaacattgatgaacctaaagcagaaccgggtaaagtcaaaattaaagtcaaatggtgcgggatttgcggaagcgaccttcatgaatatttgggaggcccgatctttattccggtcggcaaacctcatccgttaacaaacgaaatggctcccgtcacgatgggtcacgaattctcaggagaagtcgtggaagtgggcgaaggcgtcaaaaattacagcgtcggcgaccgtgtcgtcgtggaaccgatttttgccacacacggacaccagggagcctataaccttgatgaacaaatgggattcttaggcttagccggaggcggcggcggattttctgaatatgtatccgttgacgaagaattgctgtttaagcttcctgaagagctttcttacgaacagggcgcgcttgttgagccgtcagcggtagcgctttacgccgtccgccaaagcaaattgaaagcgggcgacaaggcggcagtttttggctgcggaccgatcgggctgcttgtgattgaagccctgaaagcggccggcgccacagatatttacgcggttgaactttcaccggaacgtcaggaaaaagcgaaagaactcggcgctatcatcattgatccgtcaaaaacggacgatgtcgttgaagaaatcgctaaacgcacaaacggcggcgttgatgtttcttatgaagtaacaggcgttcctgtcgttctccgccaggcgatccagtcaacaaacattgccggtgaaacggttatcgtcagcatctgggaaaaaggagcggaaattcatccgaacgatatcgtcatcaaagaacggaccgtaaaaggcattatcggataccgtgacatcttcccttccgttcttgcactgatgaaagagggctacttctcagcagataagctcgtcacgaaaaaaatcgtgctcgacgatctgattgaagaaggcttcggcgctttaatcaaagagaaaaaccaagtgaaaatcttagtcaaaccgaactaaaccgttcagctgaatatcagacacatccgaaaaagagccgttccggctctttttttcatctcttcgtctttccttccttttccttttaaaaatgatcccctctgcgcaaactatttttcaccctgtcccgtctatccttaggcagcagcctatgatacgtatttttaaaaaaggagccctttgaagcaatgaagaacgaaacagccaaagcgtcgcttgtgacgtgcataactgagcgcaaggaagacttttaccggcttgcgtacagttacgtaaagaacaaggatgacgcgttagatattgttcaggaatcaattcaaaaagcgctgacatcggtcgaatccgtcaaaaaccccgatgtgatcaaaagctggttttataaaattttagtgcgcacggccattgattttctccgcaaacagaaaaaactgaaagtgatggacgatgaaacgattgagtttttaagccgcggaaaggaagatcactacaaagacacggaccttcacgaagcgcttgatgacctgccgcatcaatataaaaccattatcattctgcgtttctttgaagacctgaaattagaagaaatcgcggacatcacgggggaaaacatcaacaccgtcaaaacacgcctttacagggggctgaagctcatgcgcattcagctgacaaaggaggatctttcttaatggaaaagagattagaacaattaagagaagagtataaaagtgtgcccattcctaaggaactggacagcattgtcgaaaaagcccttcagcagaaaccgaagaaaaaacgaatcgtgatgtggccgacatccgcggcagtcgctgcggccgtcttatttaccgccgttgtcaatatcaatccggatgccgcacaagccatgtctaaaatccccgtcatcggcaaagtcgtccaagccatcacattcacggagatgaaggaagaaaagaaccaatcaagcattgatgtgaaaacgcccgctctgtccggcctttccgatcataaactcgaagacagcatcaaccggcattatatgaaagaaagcaaagagctgtatcaggaatttatgaaggcgacctcaaaaagcaaaaaaggccacctcagtatttacagcgattatgaaaccgttactgacacagcggatttgatctcaatccgccgtgatatcgaaaaaacgcaagcttcatcctatacgcaaagccgttacatcacgattgataaaaagaatgaggccgtgcttacattaaagagtttatttaaagatgaccgttatattaaagtcatcagccaaaatattaaagaacaaatgaaaaaacagatgaaagaagatccgaataaaatatactgggtcgaagatgatgatatgacggagccttttaaagccatccgcgccgaccagaatttttatattacagataagcacaaacttgttatttcatttgatgaatacgaagcggcacccggatatatgggcgttacagagtttacaataccgacctccgtcatctccaagctgcttgtcggagaccgctacatcagataaagaaagaaaaaaatccatgatatccgcagatcatggattttttctttcgtcccgcaacagccaagatgcataagggacccttttcatataacagacgccggacgggggctgaaaagtttaagaaaatcacagcatttcattcattttttctgaaacaaaatccccttccgaatgcgtctaattaacggaacaaatggaagactgtacagaaatctgccatagccatccgcaaaacagcgagaatttccgcacacattattggaggaataccatgtcagacaagtcactgcatcaccgctatattcccggactggatggacttcgcgcctttgccgtcctcgcagttatcgcatatcatctgaatttcaactgggccgacggcggtttcattggtgttgatatcttttttgttttatcggggtatttaattacatctattatattgcctgcccaaggcaatgccattacccttgattttcgtgatttttgggtgcgccggatcaggcggcttctgccggcggcttatctcatgattatcacgacggtcatttgggtcgtattgtttaacagcgagctcctgcataccgtacgcggggatgcggtctcctcacttttttacataagcaattggtggtttatctttcatcaactttcttatttcgacagcttcggctccccttcgccattaaaaaacctttggtcgctggcgattgaagaacagttttatatcatatggccgttcctgctgcttgcgggaatgtacatatgtaaaacacgggcccggcttgcggccgcggtcatgttcctcgcgttatgttctgcagtcgtaatgagtatgatgtatgtgcccggcggagatccgagccgcgtttattacgggacggatacccgctcatttgaattgctgatcggctgcgctttagctttagtgtggccgatgaaacgattatcttccaaacggctgccgagcagcatgaaacacctgcttcacgggacggagcttgccgcttttgccgcgctgctgctttgcgtcttttacacggatgaatatgaacccttcctgtacaagggcggcatgcttttgatcagcatcaccgcagcggttcttgtcgcatgtttatgccatccgagcagctttttgggacatgtcctttcatggaagccgcttcgctggatcggaacgagatcatacggaatctacctttggcattacccggttatcgtgctgagcacacccgtacaggaaatcggaaatccggtttattggcactgcgccgtcagaatcggcgccactttcattcttgccgagctgtcttaccatttcattgaacagccgatccgcactgcgggcttccggccatttttacgccgcgtgtttctgaaccgctttctggaatggaagacgtcctctgtcatcagccgaatgtcgctcggccttattcttgccgccattctcgtatttgcgggcgggctgtcagggatagccgaagagaaaaaacagccgcaatggacgtacgcgcaaaatgatcagcaagaaaccgccgcctcttcgcacaaaacggccgatcacgatcagcctgcaaaagaagaagacagcaagaaaaaacacggcggcgaaaaaacggacaccgcgtcagacaaaaacaagaaagaaccagcagacaaatcaaatacaaagaaaaacgaagagaaaaaggaacggtcatctcaaaaagcggctgattcaaaacaaacacagcctcagcaagacgtgctggccatcggtgactcggtgatgctggacattgcgtcatacctgcggcagtccctccctcatgtcaccatcgacggaaaggtaggaagacaagtctctcaagcactccagctcacttcggaatatgcgtcatttaatcagccggacaaagcggtcatcatcgagttagggacgaacggctatttcacaaacagccaaattgaatcactgatcagctccttttcaaaagccgatatctatcttgtcaacacacgtgtgccgcggcagtgggaaagcaaagtaaacgaatcattgcgccggcaggccgagtcacggaaaaatgtgacgcttgtcgattggcacgcaaaagcattgcagcaccctgaatacttcacaccggacggcgtccatctcatacctgagggatcaaaagcgctgacatccctcatcgttcaaacaatgaaatcatgacaaaaaaagaggcccaaaaaaggcctctttttcgtatatcgtcacgcaagcttctgtccgcaattcggacaaaaattcgcgccttccgttttcgttccgcagttcggacagaatttcggcttagccgctccttccgagccgtttgccggtgccgtcccctgattctgctgactttgatcttgctgcggctggttctgctgattttggttcatttggttcatcatttgatttgccacattcattcccatcatcatgcccgccatgtctgaggcggcgccgcttccgttcattttgccggatgacattccgtccgtcatggaaatctgctgatagcggttcacatcgcccaccataccgtaagaggcatttttcgtaatcatatcctgaacttcctgcggatagttaaagctcataatattgaagcccgtaatcgacatgccgtctccgatcagctgcatatcaagatcttcttgaatcccttttccgatttcaaaggaattcgactgcagattgaacatgtcttttccttctctggtgatccatttcatcaaaagctgatcgagaatagacgtaatccggattttaatgtcctccactaaatagctgtctttgacacccgcaatcttatcaatcaatccgatgtagtcaatgaccttgaagttaaatgtgccgtttgcgcggatcggcataccgcccggcatacctgccgccggaatgttgatggcgttttttgtgccccatttcacggtgaactccttcgtattcacaaacagcacttcagcccgcatgccgctgttaaagccaaacttaaacccttttagtgtagatagaaacggaatgatttctgattcgatatcataatcgccgtcatcacggaaaatcccttcaattttcccgttgtataaaaagatggcatcctgtcccggccggatgatcagacggctgccttttttaatttcacggttgttccatttatagaaaaccatgtcgtctctgaattcttcccattccaccacatttgctaactgatttctgaaaaaacccatgtatgctcaaatcctttacatataatttaaaaactacccttgcttccgctgtaactcgtgccgcccctcgtgactccgccgtcattgtcattatctttatcaggctttttttctcttgtaacgtcggttcggatatatgtgtcgtgctggctcagcacttcagacgtatcgtgatccatatacgtgctgccggtgacggtgaccttgccgccggaattgtacaccatcacagtgacggcgattccggccgcggctgcggcaataatgagctgaaaccaccatgtgagcagcagattgtcagacttgtcgtccgggcttttccccatatctttataagccaacttgatgtaggtctgaaacgccttttcataatggcctgcggaaatatctgacgagatcgtatttctgatcgtattcagccggctgttattcaaatacgtctccgcctttttatatccggagataaatacttcccgatttttcatatcaatggtcaaaatcgccgtgcttccgctaaaatgactgtcataaaaatcaccggcgtactgctcgatatccttaccgcccgttccatttgcggtcagaatgataaaatcggtatggcgctttgccccgagcttcccggccaattcctcaagtttcttcgtttcatccttcgttaataaatgagcattgtcataaacatgcttctgttccgcggcagacgccgatgtatgtaaaccaaaagacagcatcagaaaaaggacgaagcagaagagacacgcttttttcatcgatactttcatcaaaaaccgcctcctatcataagtgagacgagtcttaatgctaaaaacgcaccggcggttatgccgccgaaccacgcggccacttttccggcactgatcggcggtttgccgacaaccttgcccgtctgcccgttcatcgcaaaaatgtgttcagcccgctcatagtcgtagctgaccatccagaccggaagcagtacgtaaaagctgctgattttatcggtctgaatctgctcatccgtaatgtcagccttcgtatatccggagaaggtggatctgatataagaatcaatataatggctgattttatccttcgcccgcggaaagagatcgtcatcggtataattgtacttttccgctatatatcccgctaaataggccgtattaaactccttcagctcactgtatgagtaaggctccaatttgtccattaattcatcactcattttttctgaagcgtcgaccggaattttgagataatcaagattgatatcgcggtacgcgttgtaatactcggtctccgtcacccggtattctccatcatcatagtgatgcactctcgtacaaacggcattgacctgaaccttgctgtttaagtcaaacatccaaaacggcacgtacatgcccgttatgctcttcacccgatcggcagacataaatcctttcggtgtcagacggccgtttcggcaccactttttaaaagcgttcatggcttcttctttactgatcgtaaaaggaatcaccatcgaaggcgcgagatttcccgataatcggtcggcgagaacggcggctcctccgcaaaacccgcacgtcgtggccgtcgtttccgcctcagtcattaataccgcgccgcaattctcacatcggtactcgttcgcctcattttcggaaaatctcgtcgttatatactcttttggcaggctctcaatctgatcctgccgcccgcagctgtgacatgtcagcatgccggatgaactgtcaaagaccatatcatcgccgcagttcgggcatttataagaaatgatcattctgtttctctcactttctctttatatcggacaaaactgcagcccgctgtctattgatctttactgaaaagcattttctgcttgagcgccgccaattcatcatcgacactgctttgattgctgtcatatttagccgtcagatcgtcaatatcgtctttcggagacgcgttcagctcagccatcgcattggcatgatcaagcgcttggttgaccttgtcttccattctgccgaaagctgtcatcgattggcccgcatttgacacagaggaccccaatttgttcattctctcctgcgtctttgccacagaccacttcgctttgatggcatttcggcgcgactcaagctctccgatatcagcgacaagcttgtcatgcattttgcgcatttgagacgcgttggaagaagcgagctgataagccgtctgcagctcagtcagtcttgattcaacagccgctttcctttccaaaaatgtccgcgcatcggcttcattgccggcctgcaacgctttcatcgcataactttccatctttttggcatcagcctggcattctgttaacgctcttttcgcccgctgttcctcagccatgacagaagccgtctccgctttcacttttcctaaatcattgttcagattccgcaaatattgatcaaccattttttcagggttttcagctttatccagcagcgcattgatattgcttgacatgatgtctttaaatcttcctaaaatactcatttttcattttcctcccaaaattaaatagtaacaagttcatagttatatatactgtttttttcaaaaaaagtttcattttctcatgaatttatgtattttatatgaaaatagtctcattcaacccatttgtaccggcggaaatttttcacgaccagatacagtgagaacaaaaaataaataaaaagcccgatcatcaacccgctcactaacggataatgcttcgccgcatacacaaagaaatccagctgcgaaatctgttccggacttgtaatcgtatccgtcccattcaaaagctttgagaatttagccgtataattccaatcaaacgaatcagaaacaagctcactcccctgataccaattgacagcggcgagacaaagaaaacaaaaaacagaaaacgcgcattgcacaataagaaaaacatgtttcatgaaaaacattcctccgcggttcaatatcacaggccgtcacactatacatgacggcagcagcagaaacttggttttactcagaactgataaaaaagttattgtatgtacttcacagcggttcaatttactggatgcctttctaaagtataccgtatatcgaaaagggtttcagacctaaataaaagaggatgcttcccgaagtccgatgactttcaagaagcatcctcgatattttacagtgatacttcaacctcttttaaactcggcaaagcatcgatcgcaccgattttggtgcacacgagcgcccccaccttattggcaaatgagacaatatcacgcagcttcgcaaaatcttcggctgctgtctgaatctcatcggtgcgtgccagctgatacagcgccgcgccgacaaacgcatctcccgctcccgttgagtctattgatgtcaccggaatgctcggaatgatgtcaatatccttcccatttgaaagaagggtcccgcttttcccgagtgtcaccgccacaatatcggccccgagctcatgaagaaccgcaacaccttctttatgatccttcgcaccgctgatgatctcaagctcttcgtcactgactttcacaaaatcacttacggcaacggctttttttgcggtgtttataaactctgaaactcttcctttccataaatcctcacggtagttaggatcgaaggaaataaactgtccattgtctttcgcaatcgacatcagccgtaaataggctgagcaaaacggatcagataacaatgccgtcgctgatccgaaatgaaggattttggcatcgtttaccttttccagatcaatatcatccagcgtaaacaaagcgtccgctcctctgttaaacacaaagtcgcgctccccgttttgttttaatgaaacaaacgcaagcgttgtagacgctttctcatctatgacgagcatagaggtatcgacatgtacggcgtccaatgtctgcttcagaaaatacccgaacggatctttgcctgtttttccgctgaaagccgcgtctccgcccagcttagcaatcgctgccgacacattcgccggtgcgccgccggcactttttaagaaattgcgcccttccgtcaaatcaacatccacatcggtacaaaagaaatcaattaacaattctccaatacaaataacagattggcttcccacattatcacactcatttatcaattctcgattatagtttcagtatagtgctttctgtcataaatacaaccgtttacatagaatattttaaattttacgtatacttatctggcagccctttgctccagatcagacatcatctgctgatattttttttcagttaaaggataaaaagaaataagaataatagacagcagaatgaacaatcccggaatgagcgcattcatatttttaatcgcattcaatgacgagaccgtctgatcggtattcgcggcatatccggcgattccgagataaacggccgaaaatgacccggctaacgcaactccgagcttattgatgaaactcatgctcgaaatcaccacgccatcagcccggactccggttttccattccgcataatcgacacaatcggcaaccattccccaagcaagcgtatttaaaggcgtcgtaaaaaatcccgaaacgaaaagccaaaagaaaataagcggcagcgaagaatacgatgtaaactgaaggcccgcataagaaatcagcgatagcgccgccgtgatgatcataacctgcttccggccccgcttctcagaaaagaaaggaataaacagattgctgatcagcgctgcgccgaaaaacaacacggttcctaaaaacacaaattccttatggctgacgttatacgtaaaatagtacaccatcgtgctgagcttaatgttaaacccaatcgcaaacgccaaaaatgcagaaaccaaaatgagcaaaggcttgtttcggaacaaaacagacaacgtctttttcattccttgtttttttcttttttcaggctgaatccgttcccgcacagtaaagaaactgaacagattcaatgcgatgctcaccgccgcatagataagcgccgtcatttggaatccaaacgcctgatctttcccgccgatggcgtccgcaagcggtgtcgcacaggaaatcgataacagaattccgatataaaccaaaatcatccgggtcgtcgtcagaaccgtccgttcctccacggaattcgtcatccgccccgttaagctgttgaccggaatcgtctgcatgctgaaggacatcccaagcagaatataagtgatatacgcataaaccatgttccccgtctcgccgaaatggggggtcgtgaagcataagaacgtaaatagcgcaaaaggaaacgccacccacaaaagatacggccttgcctttccccatcttgtattcgtcttgtctaaaatcgcgcccataatcgggtcaaaaatagcgtccagcacccttacgataagaaacaaagctgcaatgaccgcaggcttaatgccgccgacgtctgtatagtagaataataagtatgcgtttacaaactgaaagataatattgtacgacatatcgccgaatccgtagccgatccgttccatccaggacaggccgcgatatttcgtctttactgccgctgctttttctgtttcaatcatcatttcccaccccaagaatccgttttcatttttgataagcaagagggagaatgcaaagatcctccccgttcactcagcgatttggatacaccatcacttttaagcattcatttttgtattgaaaggcccgttccatcgcctcttgcgtctgctccagcggatattggtccgttataaggtgcttcgtgtccactatgccggaagcgagaaattcaattccattcggatacgtattcgcataacggaagattccgtatatatcaatctcgttatctgcaataaacggcacattgagcggaatctcattctgagaaggcaaaccgacaatcgccagttttccgccccggcgcacggaagccagtgcggattgcaatgccgccggattccccgctgtttcccaggcagcatcaacgcctctgccattcgtgatcgttgtgatttcttcaccggcatcctgttcccggacattaatgacatgcgtcgcgcccatttttttcgcggcatctaaccgcagcggctccaagtcggtcacaatgattgtgcctgccccgtatgctttcgctgccgcaacagccattaatcctacaggccccattcccataatcgcaattgttgatccgggctgaagctttgttctcgcggccgcatgaatgccgacagaaaacggttcgatcaaagccgcatcttcataggatagtgaatccggaatcgagaaaacaaagtcctgacgcattttgatatattggacaaacgcgccgtcaaccggcggtgtcgccaaaaactgtacatccgggcaaagattataacgcccctccttgcacgcctcacagcgtccgcatgtgacaccgggttcgacggcgacacggtctcccaccttgaattgatcgacagacgatccgacggcggcaatttcccccgcgcattcatgaccgaggataaatggtttttccactacataattgcctattctgccatttgtatagtaatgcagatcagatccgcaaattccgacagccatcacctttatcaatacttcatcatgattgatctcaggcacgggcaatgtttcgattttgatttctctcgtgttgtgcataaccgccgctttcatgttttgaggcactgtgtgagtcatttggcaaaatcctttctctgctttgaaatgtaagtgcatacatttttgttttctctattactgcccctattttatctgcttttcaagacgtacaacagcctttcctgctgtataaaaggacagccgcactgtactttttattttttcatatacaaaaaacactgaattgataaaatagtactaataggaggtgcaggctaatggctgaacttgaaaaccggacacaatttgcagaactgctggcacctgccgtcaaatcgctgaaacatcatcctgatttcaaaattaaaaggacaaagaacgtaaaatccagacagtcttatatagagcaaatcgcactccgaataggcgtttcctctaacacgatcaaaagctggatcggacagatgggcgcaaactacattcccggacgaattgacgacggaaagctgttcgggatgatctggattattatagaaaagactgacatggatcctgaatggctgaccggccttctggaaaccaccaccattcccgtcatcaaacccgcattgcccgtttggacggcgtcttgtctaaaaaaagcaaaaatactccggaaagacggatcattcggagcgccgagtgatgaagatgttgaaaaagcagtaaagcggctgtttcatgacagacaaagccacgaaacgaatgcgcttacaagaaagtccgtcacgcataacctaccatcacgccggacggggaactttatcggacgcggctttgatatggaagcgatccgacaatggatgctgtctccgtcaccggtctgtttaatcacaggctgggccggcatgggaaaaacaacgatcgctcttgaagcagcctacctttgtgccggcgattcaccagattggccggcattcaacagcatcatctggatcagcgctgactggaaaggattgagcttcagcgattttttaaacacgatcgcctatcagctcggacgcaccgaacaaatcgacaaatcaatcaacgaaaaacggttcgtcgtccgcaatgcattagccgctcattcaaatgaaacaccggtattgctgatcgttgacagcattgatacagcggaacgtgacattcacgaatttatcatcggccttccgcaaggcgtaaaagtcctccttacggcacgggaaaacgtaaaacagacataccgggacggcctcggggaactggcggccatccagctgagcggccttgaacaaacggatgcccttgaatttttccatcaagaagtgcaccgctgtctgcaaacatgcaacctcccgcataaacgggaaaagctggagcagctgttgcagctatcacctaaccttaagaatgaattcgtctcggcagctgccggcaacccgaaggccatggcactgagcattgcatacatgtcagacgacgacatccccgctccccagctcatacaagagcttaaacaagcgggttactcattattggaattgtttgaggttctctttggccgcacatgggacagatgtcatgaagacacacgaaaactatggcagacgctttgctttttctctaagccccctgacgaaaaaagcttggctcaagcggccggattagacgcccgccgttttcattacgcgattgagcaaatgaggtcatttgctttaatacagccggaacgaagcgaaggaagaattcaatacgcagcccatcaaaccgttgtcgcttacggagaacagcacttatccgaaaatcatgattttgcaaaagaagcccgatgccgctgggcgcattattatatggattatgcggaaacccatataaaacgggaacagccgaattccatctattggagctatctgctgggacggaatttagagctaatgaaaaaggaatggccgaacatcctaaaggtcatcgaatggtcgagcgaaaccggacaacatgacatcctgatcaaactcatcacccgcatcagccattttctaagcagaatcaacctgcccttacgaatcgaatacggccgtaaagccgccgacgccgcccatcaattaggcaaacacacgctagaagcgttcttccgaatcgacacagcaggctgggcactcatggaagtcaatgatttagacggggcacttcaacaaattgaagacggactgaagattctggaacaatcagacactgaagagcaagacgttcacgatctaaaggtatggggactcgcactgcaatcgaggctgtttttaaaagccggaagtcatgaaaaagcagaagtgattttaatcgatatcaaagatcaaccgatttcccctgcgattcagcacagagttctattggttcgcggagatctgagctttgtgaaaggtcataatgaagaagccattcaattatacgaagcggcaaatgagatcagctccatgtatgggggcgaaaaaacgatagaagcctatttcaatttgggtatagcttacgtgaagtgtgatctgtttgagaaagcggaagaagcttttgagcagatgctttatgacaaacataacgcgaatcaggttgagttgatttattattattacgggatggcactcctgctgttccgtaaaggcgagcatacgaaagcgatggaatttaatcagaaggcaattcttttgattgattcgtgggagcctgcgattgggattcgaggagaggtggaacaattgggtaaggcgcttgaaggaaatggacgggcttgaggctttacttgagatgaaacaacgatggcctgatatgaagattgtgctcatgacaacgtttgaggataccttgcaggcgtcaactgcattggagaacggggcggaaggctacatgctgaagtcgattcatccgcgggagatgaaggaagccttgaaacttatttataacggtggaacctggatcgaccaatcggtcgctacgcgagttttcgaagagataaagcgtcaacgcgagcagttggagaagatcggctcaagtaaggacagctacccgtacgggcttacgaaacgagaaatggagattctggagcatctgtcaaacggcctgcgctacaagtcaatcgccgcaaagctatttttatcggaggaaacggtccgcaattactgctcgaagctcgacgtcaacaaccgtgaagaagcaataaaaatggcgcgaacggagaatattgtgtaggagcaggagaactttttcgatatttctcttgtttttttcaaatgcttcttccccataataatcaaatcgtttatcaaccttaacaagctaaagtcacataatagtagtttgaaccattatagaaatttaaactgtttttcaacaaaaaaagtgcattagtccttcttggatcaacacactagttaaatttataagctccttatatgtttttttatttttaacacgtttcttattaaaccctttttatatgtatcttagtcagaatgtttaatagattaactacaggaatgctatcctgccccgatagttcattacggaagtccaaaatcaagtattgatatcgcatcttttttataaacatcgtgactttatttcaaagctacaaaaagccctccagttaatttggagggcttagcatgcgttttttccataatcatatactaagtctttctgaattgattaaacatagaagaaactcattcaaaatggaggaatggagaaataacagctgttatgtttatggaaatgttagaagaaaagtagcatctctcctataggaaatgctatttttcctcctattgtaagaatgatggtactccccttaaatatttgctatgattcatgtttggatgaatccttacttctgcttaataggcaaagcatgataaccaaaagccaaatcgagtaaggcactcgcttcttgacgtagtaacagatccttcggacggaaggtaaaggatccgtcggcgtggatggtagtatcagggtctacgattccttgtgaggcaagtgcttgaatggcttggaccccccagtcatccgcagcatcaagcaattttactttaatagctttgtcaggctgaatcggtttcatgtcatgaatttgctttaagttttgaatcatggttgctgcgacctgtcgggtaatcggagtagcacggtcataccctggaattcctttcataattttttcccttgcctccttggagtcgtctggaaaaccgttccatccataagcaagtaacaacgtatccgcaaactctccttgtgtcatgatgtccatcggattgaatagattacctgttttagcacccataatatttagagcatgaagattatcaatgtgacttctatagttactcttttgtggaacgtcatcaaaaggtggtttgttgttaattctctgggcatctgctacaaaatcaaggcttttaggagagttgtagtgaaaatatgcgatttctccagctgaattctttttgaaagcaactttgttgcctttcgaatcttcaaataacaacggatgaatcattttgagaacttgttttccagttgttccaccctccatgaccaaattcccattttcataagtaaaatgagtgcgaattgcagcgaaacgcgtattttggaataagcccaagtatttatgagcttctttttcctctaacgggagataacttgtttttacttcattcttcttagcagggaaatagtgatccatgagagtttcatatatgtctatactcatcattgaatcattattgtaagacatgaagaatgctgttttttgttcaggcactaaaatcagcattgattgatgtcccggcatgcttcccccttttattacaacgtgttgaccgttagcaaattcattaaaaggcgtttcaaatccaattgttgcaacaggaatcgtcttatctgcgaaaacttggtagtcatgcatcatatccatgcttcttttacttacgatttctttacctccaaactttccattctgtagctgcataatcatgtactttgacatgtcttctccagtggacaaaatgcttccttgtggtgcatctgttagaccatgcccacttgttggaataggatcgccagtgggaccgtaatgtgtagccattctcttgagaagatcaggcgtaaaacgtacacttgtagacttcatgcctaatggtttgaaaatattcttttccatatatcgtgagaaagatgagcccgtaacattctccactgcatatcctgcgagtgcaaatgcgaagttgtcatacgtataagcttcaccgggcggccgtaccaccgtcggcatatgtttagagaaaaactccttcatcgggatatcttgattaacgtattctggtccggttattgtagtgatatcgggaaaatccacgccgctggtataggtcagcatatcaaacagggtgaggggttttcctgttttattgggtattttcaatccaccgagatattgttgtacatcttgatctagtttaagctttcctttatcgacttgttgcatcacggccaaggcagtaaaagttttcgagactgaagcaatttggaagaccgtttccttattgacgggaatcttcttttctttatctgcataaccgtaccctttattgatgacgacctttccatcatggacgacgacaaaacttgaaccgtttacattgtactccttcattttttcctcaaataacggatcagcaaaagattctatttcttttgcattattgggagctttcgtcatttggacatcgggcgtggatgtcgatggttttgattctccaacttctgatgattgtggggaacatgcagaaatcatgctagtagaagtgagaagaattgcgagactgagtgtattgattgcttttttcattttcggactctcctttgtttgactgaaattttcttgtcagcacaacgagtagtcagctcgtcagtgtataaaccgagtgtagcaatcggaaagtcatagtagctagtgacctttcgtcatcttcatgcatgacataaaaaatagagcgtagtacggatagttttatagtcatgacctataaatcatgacactttgacactaccgtatgtgacaggcgaaaagttagaatcgaagagcggctcataacgtattagtaaagaaaaaggaggagaaactctaatgtcgaaagaagcagctcaaaaaagtttgcaagatttctacttttttttgtttaccttcggatctggattgttttacttttgcttctatttggccagcattacatttgcactcgtgatgacagttatcttcgtaggtattcccttgttagcgagtgtgttgcggacaactcacacgtttgtccagtatgaacgtattcagacgaaggtttatacggatatatcgatagagccaatcctaccaaggacaaaaagtggaggggataaatggattgaagcgaaagaagcaattcttaatagtaacaattggagggctattttttggctcatgcagaagtttcttattggggtaattagcctcttatgtgccgttatattgtatgtagctccgcttgtatttatcgttacaccgttactttttcaatatcttgatgtatatttattaggaataactgtgaattcatggaaggaatctatatgtgtcatgatcgctgggggtattctctcctggatacgtacttgtattggaaacagtttagttcaaatgattggaaagtacacgatttccatgttcaaagctattaaggggtgataatttgtttgggattttgaaacaatggttttggtatgactgggtattactttgtatacgttttgtcatctggctctcaatgatgttaactactatccaacatcaagaccatttgactgtgccactttggatcatcattctttgggaagtagcctcattttcagtaccttggatttgtttaatgttcagttatcgctattatctgtttactgagataattttgtttggtggagtttgcttctacttaatcttattatttccagcggcttatcttgcttttttaatgccgactttcatgatcgcggcaaatagtgcccataaatcataccgttggtcgggttctatcacaattgttttgtttccgtttctcattgcaatattttcccgtgaaatagatgtatgggtgattatcctacaaatgggtctggcttttgcaatgggattttcctttcgcttactcgttgttaattaccgtaacaatgaaattattcgtaaccagaagcgtgtattggaacagtatttatcccagattgaacgaattactttgctagaggagcgtgatagactctcaaaagatttgcacgatacgatgggacattcctatacctcaatcattatggggatggaaacattacgtacggaattaaagacaaaagatggggaacaaaagcttgactcattattgaaattggcccgtaacagtatggcagaagtgagaacgtatttacatcaaatggattcacaacaggaagcacttccgctaattgttaccttgaaacaattagcggaagagtttcagaaacatgcaaaagtaaatgtacgcactcgaataataggggaagagtacacggtccccaaacaagtgaaaatgacactgtatcggagcttgcaggaagcactgactaatgctgtgcgacacggacaatccaccgaaatcattgtgtcactgcattttgagccgcaacagacgagattggatgtgcaagataatggctgcggagtggaggaatggaaagatggcttcgggttaactgcgatgaaagaacgtacggcacaattacaaggtagagtcactatatactccgaaaaaggcgaggggacgctcatctcatgtgcgttacctaggttggaacaattatccaatgaacgaatccgcttgtgtatcgtcgatgatcattcgtttattcgagaaagtctctatacaatcttggatgaacagaaggacttgcaggtagtgggcatggctgaagatggagagcaagctgtagaattgtgtggaaggctgaatccagatttggtattaatggatttggagatgcccaatcaggatgggattcgtaccaccaaaataatcaaggggaagtggcctgacattcgtgtcctcatcctgtcaacgtttcaggatatagaaagggcgaaggaaatcatacgaagcggcgctgacggctatctgctaaaatccatagagtcacgtgaactagctgaatcgattcgcctcgtctatcggggagccactatgattgaccaagatttgttccatagaatgtgggatggaaatgatgaggcagagccagccggattgaagttagatggaaaagagtatggcttaacgaaacgcgaactagaggttttgaatcttttgtctcaaggaattcgttataaaacaattgcttcggaactttacttatcaaacggcactgtaagaaattacgcttccactctctatgataaattgggagtcaaaaatcgagaagaagccgtgcaaaaggcaagagatacaggattactttcataagagggattactttcatctgctaggggtgtgtgaacgttcaaggtttcaggggaccacatgtcaaaaatatgtgttataggcgattttacagcttctataaataatgttttgtttttgttataagtttttaagtaattcatgtttaattttcaatgaatcatataaagatataaagacaagcatattacaccccatagctttagacatactcatacatccccttctcattgaagctggtgcaggcgtaaaggagattcaagaaagattagggcattcagacatcaacacgacgatgaatatttacgctcatatgacaaaaaatatcgaagaaaagacctcccataagttcagtgaacttacgaaaggtcttctctaattggtgaagtaaatttgtttcaaaaactgaaagttagcaaaaagttagcatttcactaatctccaccttccaaacccctatatatcaagggttctaggcgatgattacatcattccgcccataccgcccatgccgcccatgtcaggcattcctgcgccgccggcgttttcttccggtttgtcagcgacaacggcttcagttgttaagagcattgctgctacagaagctgcgttttgcagagcagaacgtgtaacttttgtcgggtcaacgatacctttttcgatcatgtttacccattcgccggttgcagcgttgaagcctacgccgattttttcgtttttcaggcgctcaacgatgacagatccttcaaggcctgcattgtgcgcgatttgacggatcggctcttcaagcgcgcgaagcacaatgttgatacctgtttgcgcatcgccttcagcttccactgcagcgactttgttgtatacgttgacaagcgctgtaccaccgccggatacgatgccttcttcaacagctgcgcgagttgagttgagggcgtcttcgatgcgaagtttacgctctttcagctcagtttcagtcgcagcgccgactttgatgacagctacgccgccggcaagtttcgcaagacgctcttgtaatttttctctgtcgaattcagaagttgtttcttccacttgagcgcggatttggttgacgcgtgcagcaattttttcagtgtcgccggcgccttctacgattgttgtgttttctttcgttaccacaactttagaagcgcgtcccaattgtccgatttcagtagatttcaggtcaaggcctaagtcttctgtgatcacttctccgcctgtaagaacagagatgtcttcaagcattgctttacggcggtcaccgaagccaggagctttaacggcaacagcgttgaatgtgccgcgaagtttgttgacaacgagtgtagcaagagcttccccttcaacatcttcagcgatcagaagcaatggtttgccttgctgtacaacttgctcaagcacaggaaggatttcttgaatgtttgtgatttttttgtctgtgattaagatgtaaggattgtcaagaaccgcttccatcttatcagagtcagtcaccatgtaaggagacgcatatccgcggtcgaattgcataccttcaacaacttcaagctcagttgtgaaacctttagactcttcgattgtgatgacgccgtcgtttcctacgcgctccattgcttcagcgataaggcttccgacttcctcatcagcagcagagatcgcagcaacctgagcgatagactctttgccttcgatcggcttagaaatttcttttaagttttcgattgcaacggttacagcttgttccatacctttacgcacgccgacagggttagcccccgcagttacgtttttaaggccttcgcggatcatagcctgcgcaagtacagtcgcagtcgtcgtaccgtcaccggcaacgtcgtttgttttgctggctacttcagctacaagcttcgcacccatgttttcaaacgcatcttcaagttcaatttcttttgcgattgtcacaccgtcatttgtaattaacggagaaccgaattttttctccagaaccacgttgcgtccttttggccctaaagttacttttacagcgtcagcaagcgcatcgacaccgcgaagcatagcgcggcgtgcttcttcactaaacttaatatcttttgccatgttaacgaaacctcctcgaatttttaaaaatatttatttgcttagccgattacagctaaaatgtcgctttcacgtaagattaagtattcagtaccttcgtatttcacttcagtaccagcgtattttgagaagataatgcggtcgccctcttttacttctaaagcaacgcgctctccgctttccaacacgcgacctgaaccggctgccacgattttgccttcttgcggcttttcttttgcagaatccggtaatacgattccgctggcagttttttcttcagattctacgagttcaatgacaacgcgatcacctaatggctttaacaatgtaataacctcctcaatagtatgaatatgtaattttagcactcagctctaaagagtgctaacacagttattataataaagaatctcacttccaatttcaagtcataagaataaaaaattttcacgcttacatgtttctctctcgcactgattttctccttttttcacgtcaagttcacttgtgttacaataagaacaaataagttgattttataggataaaggagtacatatcatttgagaaaacagtattggtatatcattttgacatatgttatcatgcagctttccgcattgatcggcattcctttaatgtacaaattcggctatgcgggcgggcaccctacgaatgagaatctcaccatggctcaggggatttattccgtcgtaagcttttttatctgcctgattatcgttctcttgattttgagaaccgtgccgaagcagacattaagaaacgggaagaaagcatccgccggcatgtcagttctctgggcggtcgcgggaatatggctcgctttattttctcagggaatcgccgggatgattgagcagtatgtctttcatgtgggcagcggttctgaaaacacgaaagccattctcaacattattaaagccatgccgctcatgattatcgtttcttcaatcgtcgggccgattcttgaagaaatcattttccggaagatcatcttcggtgtattatgtgaaaaaacgaatttctttatcgccggactgatcagttccgtcattttcggcattgtgcatcaagacctcacgcacctgctgctgtatacggccatgggctttacctttgcgttcttgtatgtgcagacgaaacggattattgtgccgatattcgcccatgtcatgatgaataccattgtcgtggtcatgcagctcggccccgcccaaaaatatattgaacagcatagtgagcaaatgcaattaattattggaggattgtttgtatgaggaacccaatgacttggggcttgatttatttcgcagtcggctgtatctttacgtatttggccgcaagctctccgggaagcatgtggtctttttattccatactgctgatggttttcgccgcttataatatcagcatctcgtttaaaatgttcgccttctcatttaaagtgaaaaaaaatcaaaaataaaagaaaagccatttctcatcattgagaaatggcttttttatgctgatacgtcctggtcagattcactgccggtctgccttttccgatacgccgcttttgaaatcaggatactgatctcgtataaaatgcaaagcggaatggtaatcatcaagtgagacagcagctcaggcggcgcaatcatcgcggcgatcacaagcagcacaaaatatgcgtacttcctgatcttcgataaaaacctaggcgtgataacaccgagtctcgttaaaaacatgatcagcaccggcatctgaaacagcagtccgaacggaatcgtcagctgcagcagaaaatgaaagtactcagtgatcccaatcacctggttgacatcgaggtcattcgagacccgcttcataaaatcaacgaccagcggaaataaaatataataagaaaacgacacaccgccgacaaacagcacgatcgaaatcggaatatagctgagtgttactttgcgctccttctcatacagacccgggctgacaaacgcccaaatctgatagagaataatcggcgaagtcaaaatgatgccgatgataaacgcgaactgcaaaaagataaacagcggatccgtcaggttaaaagcattaagggtgagctcttttacttcatcggctttttgaagatacacaatgataggttttgccagaaaaaagccggcaataaagaaaaccgtaaaggataacgccacaatcagcaatcgtttccgaagttcggcaatatgctccacaagcgtcatttgattcactctcatacgcgtcatcctatcttactgttcttctttctttttttcctcttcttcaccggctaatcccttagtagcgttcttaaattcacgaagcgtgtcccccgccgcttttcctaattcgggaagcttcttcggaccgaaaataatcaccgccaccacaccgataaccgccaggcttccaggaccaatcatgtgcagctcctcctttcgctattcaatttcttccaaaacagaataatgctttaagaaataaaccaatgattgaagctctacagctaaatctatatgatgaattcgaatgtgatccggcacattcaaacgggccggcgtaaagttaaggattcccttgattccgagcgacacgagccggtcggtgattgactgggcggcaaccgccggaacggtaagaatcgccacgggttcatccttaatgtgaagctctaaatcattaagatcaaagacaggcacaccgcctacctcagttcctattttactctgattcacatcaaaagccatagatatttttgtgttattattttttgtgaaattatagtgaagaaacgccgtccctaaattcccgacaccgatcaaaatgacgttcgtcgtttcatcctgatccagtgtttttctgaaaaatgacagcaggtaatccacattatagccgtatccttttttgccgagcgccccgaaataggaaaaatcccggcggatcgtggccgaatcgacttttaccgcgtcgctcagttcagctgatgaaacgcgctgctttcctgacgcgtgtaaattctttaaaaagcgataataaagcggcagccgttttgccgtcgcctgtggaatttttgattgatccttgttcatgattggtcctccactttatactcagatgcatctcttttaaaatcaccgtttttccctcctgttttttccaagaggcaggtcgggccgatgaccattcctttatccagcgccttgcacatgtcataaacggtcaaagcgcagactgaagcggaagttagcgcttccatttccacacctgtactccctttcgtttttacgcttgcctgtatatgaagaacggcttcggaattcttttcctcccagccgaatgaaatgtcaacgctgcttaaagaaagcgggtggcacatcgggataatcgctgacgtctgctttgcggccataattcctgccacctgtgcgacagccagcacgtctccttttccgatctcgcggtttttgattctgctgtacacgtcatgcttcatgtgtacgctggatatcgcagcggcagtacggactgttgaagatttatcgcttatatccaccatgcgggcatggccttcttcattaaaatgagaaaatccattcatatttaaactctccttacttctgatcatacactattttctccctgatgtcttatcctataatgttccaattctgatgtattgtttgctgacagcaggttgataagctacacttaacttattataacagaggtgaaataatatgatgatcttacaaattaatcagctatccaaatcttttggcgctgatcctattttaaacaatataaagctcgaagtcagatctcgggatcgcatcgccatagtaggcagaaacggagccggcaaatcaactctccttaaaattatcgcaggtcacctttcatatgaaaagggtgaattaatcaaaccgaaagaattaacgatgggatatcttgcccagcacacaggcttggaatcccagcttaccataaaagaagaactgctgagcgtttttgatttcctgaaagcaatggaaaaagagatgcgctctattgaagaaaagatggccacagccgcccccgcggagcttgagacgctgatgaaaacctatgacaggcttcagcaggatttcaaggataaaggcggctatcaatatgaagcggacgtccgatctatccttcacggcctcggcttcggaaaatttgacgattccgtgaaagtgcaaagcctgagcggcggtcagaaaacaaggcttgcgctcggaaagctgctgctgacccagcctgatctgcttgttctggatgaaccgacgaaccatctcgacatcgacacgcttacatggcttgagcattatttacagggatattcaggcgcaatcctgatcgtttcccacgaccgatactttcttgataaagtcgtcagccaagtgtacgaggtctcacggacagaaagcaaaaaatacctcggcaactacagcgcctatttagaacaaaaagctgagcagtatgagaaagacctgaagctgtatgaaaaacagcaggacgaaatcgccaagcttcaagattttgtcgaccgcaatctggccagagcttctacaacgaaaagagcccaaagcagacgaaaacagcttgaacggatggacgtcatggcaaagccgctcggggatgaaaaatcagccgccttccgttttgacattacaaaacagagcggaaacaacgtcctgcgcgtacaggatgtttccatcagctatgacggccagcctccgctcttgaaaaacctgaccttcggcatcacaagaggcgaaagcgccgccctcgtcggaccgaacggaatcggcaaatcaaccttgctgaaaaccattatgaatacaatcagtccggaatccggatcgatcacgtacggttccaatgtcacaatcggatattatgatcaggagcaggctgaactgacctcgtccaaacgcgtgctggacgagctgtgggatgaatatccggacatgccggaaaaagagatcaggacatgcctcggcaacttcctgttcagcggagacgatgtcctgaaaccggtccgctcgttaagcggcggggagaaagcaagagtcgcgcttgccaagctgatgcttcaaaaagcaaactttctcatccttgatgaaccgacaaaccatcttgacctggacagtaaagaagtgctggaaaacgccctgatcgactacccgggaacactgttatttgtatcgcatgaccgctactttattaacaggatcgccacaagagtgctggagctgtcacctgatcatgcagaagaatatttgggagactatgactattacaccgagaaaaaagcccagcagctggaactggaagaaatgaagcggcaggaaaaggagcaggctcagcctgccggcaaggtcaaacaggatacgaaaagaacttacgaggaagaaaaagaatggaagaagaaagaacggcagcgcctgagacgcattgaagaaatcgaagcagccgtctcatccgccgaagagaaaatcagcgccaatgaggagctgctgtgcgatcctgacgtgtatcaggatcatgaaaaagtacagaccattcacgcggagaatgaagctctgaatcaagagctcgaaagcttattagcagaatgggaggaactctcctcagaagaatagaaaaagtcaagcacctctttaaggggtgcttttttatccacagctatcctccttgtcagccatgtaagtaagcgttttatacacactatccacaaaattttctgactttatccactttactaacaacttatagtcccttatccagcctggatttctggatatattcacaatcctgtggatatgttagaattgtctgttaataagtaaaaaaagcctcacgttttacaacgtgagacgatcaaaggatgttaattccaaaccgggctgtccgttcatatcatatgagccccgaatccccttttcaaaagcaacggttccggcagccgcaatcatcgctgcattgtccgtgcataaagaaagcggcgggatgacaagctcgggatctcccgaatggctgaattcctgctgcagtgcggctctcagccctttgttagcggctacgccccctgccagcagcacttgtttaaccccgtattctttcgcggccttagaggtttttgccgtcagtacatcaatgacactctgctgaaagcttgcggcaagatcctccggaggaatcacctcatttttttgcgaggcgttatgaagtgtgttaatcacagctgactttaggccgctgaaactgaaattgtaagacccttcttccagccacgcacgcggaagcggaatggaatccgttcccacagcagccagcttatcaatctgcggccctcccggataaggaagccccatcgttcttgccactttgtcgtaagcttcgcctgcggcatcatccagcgtttcaccgataacctcgaatgaaccgtgctctttcatataaaccaattccgtatgtccgcctgacacaaccaaagcaagcgccggaaattgaagttctcctatcagcctgtttgcataaatatggcccgcgatgtgatggacgccgactaacggtatttgatgggcaaagcttaacgcctttgccgcattgactccgattaacagggctccgacaagtccgggtccttccgttacggcaatcgcatcaagatcatcaaagcccatctccgcttttgaaagagcttcttcaatcacaagggtaatctgctccacatgatgtctggacgctatttcaggcacgaccccgccgaaacgtttatggctttcaatttgagaagcgacaacgtttgaaataatttcattcccgttttttacgactgaggccgctgtttcatcacagcttgtttcgattcctaatacataaatatcttgtttttcactcatgtaatgtcacccacattaataacgcatcttccccgttatctgtatagtattgttttctgattcctccggcctgaagaccgaattttttatataaggattgggcgggatgatttgagaccctgacttcgagagagagccttcttgcctttttttctctgcacaattctatcgcagagcgaaacagcgcttctcccaatgattggccccgatattccggcttaatggctatattcgtaatctgcgcgtcatctataataatccagattccgcaataccccgccagacagccgtccttttcaatgacaaggtagtgggcatacggattttccaaaagctcatgataaaatgaatccttcgtccacggagaagtaaaggatgctgtttcaatttcataaatttgatcaatatcttccggacgcatgcttcgaatcgccgttttcgttttcatccctatcaccctatttttgagattccatccatttcgcttcagcctctgccagacgcaaataatccggaacaaggctgtggacatccgcttcttctttttccaagcctaaaaacgccagctctgacggccgcggattatgctgtgcagccgttccaatcactgcttgagatgtcagctcatgcaaaatggtttcttcatgaatggctgtatcgtgtcctaaaaataaaaccggagacgctttttctttcagcatgccgagccaatcagtcaaaaggacattctgatcaggaagaacggattgtaatcggccatcctgatattcataaagtcccgtatatacctgtccgcgccgggcatcaaataacgggcagatcagtccttgaaagtgccgtccgttagccgccagcacctccagactcgagacagcggaaaccggaagcttcagcgaccatgccaatgtttttgccagcgtcacaccgattctgacacctgtgtacgatcccggtcctttcgccaccgctatttttgtaaggtcctgcggtgttaggccgcaatccttcagcaatgaattgacagcaggcatggcccgcacggaatgattcttttttaaatatgtaatatactccgccatcaccgttttgtcacgaacgagcgcggcacccagcgtgtaatttgacgtatcaattgccagtattgtcatgtttatttatctcctcacaaagcgtttcataccgtgttccgcaagccgtaaaggtaatgtcccttgcctcatcaccggctcttgtgatgacgatctgcagccgttcagcaggcagctgatcctgaattaaatgagcccattcaattaaacagacgccttgtccctcaaaatattcttcaagccctaagtcttcgctttcatcctccatacgatacacatccatatgatatagaggaagcgaaccgtcatggtattcttttataattgtaaaagtcgggctgtttaccactctcgtgattcccagtccttcggcaaaaccctttgtaaaagtcgtttttcccgcgcctaagtcgccttccagtgtcaaaatgtctcccggctttgccaaagaagcggcaagcttggctacggctttcgtttcttcggggtttttcgttctccattgtaatgtcttcaaagtgagtcacccgtcttatttaaaatgattgtatccttttttctcaaggacgatttgtctctgatcattggctgtcaaaagaacacaggcttccttccgttcagataccgctcctatcttcgcaatcggaatgcctgattgagtgcagtaatcaagcaaagaaatccactcttgctgagaaaccgttccaaccaattcaaaatcttcaccgccgaataacacccattttttccactcagaatctgcctcaggcaaatccggatgcaccggcagaagttgttcttcaatttctatcgtaactgaacttgccgcagctatttcatgcagctcactggccaatccgtcactgatatcattcagcgccgcacgctgaagctgagagcagaagcggccgacctgaactctcggaacgggccgtttatgttttcggataaaataatcagtcgcatgaaaagcagaagggagtgtctctcccaataaaagagacagtcctgctgcggacgagccgatatcccccgtaacaaacacaacatctccgggtcttgccgagcttcgcagacaagcgcgatccttctcaacttctccgatgacagtaacggtaataacagcttgaccggaagcggagacggtatctcccccgatcaaatccatttgatatagtttcgccagttccgccattccttcatacattgcctggacgtgagctttctgccagcaagaaggaaccgctagagacaccaaataaaacttcggaatgcctcccatcgccgccacgtcactaatgttaacagcaagcgccttataaccgatatcatgaggagaggaatactctaatttaaaatggacattctccaccattgtatcaaggcagacaatttgctgcatatggggtgacgctgtataaaccgcaccgtcatcaccgatccctacatcgacggaaggatgataatgcgaatgcggcgtaatactgtgaatcaaatcaaactcatccatatatctcccgtctccctttctgacgctcttgtgaaatacagctctttctagtgtatcggattatgtttcaatatccaagactttaacgatataaagaaagcttggttagataccaagctgccagcatttaaaagaaaacacaaaaaaaaacgaaaacatgatcgtttcgtttacaataaaaatggcggtccggacgggactcgaacccgcgacctcctgcgtgacaggcaggcattctaaccaactgaactaccggaccatttttttggttgcgggggcaggatttgaacctgcgaccttcgggttatgagcccgacgagctaccgaactgctccaccccgcgatgataaaattttagaaaagcttggcggcgtcc

SEQ ID NO: 39 - DNA, 32070 bp, Bacillus amyloliquefaciens
tctttaaaattgtcaaaaatgacttttgcgtattgctccgtcacttctttcgacacggaggctttcagcttgtcgatcgccttttcgccgattgtcgcgccgacatagtttgatccggcattcgtatgatatttcagatccagcttcttcggatttttatccattaccgtgctggcgtttttagaaaaatcttcaggaatctcgaccaataaataatatttagcatttaataagtcctttaacgattgatcaagatcgtttgaaaaatgccaatcaaaattatcatttttctttaactctttcacaagatcgtcaccgatctgaagatgtttcccttcgtagtccgcccctttatcctggttgacaacgacaaccggcagctgatccaccgtgccgtacgggtcccagtacgccttcaaaaacactccgctgtagatcagcggaacgaataatatggcaatgatggggattaacagtttcttgttcgttacaatgtctttccactggctttttattgtattcaaccctgttgcctccttccgcaaactgactcatttgacaaaacggtcacggcacctaaaaagtgaaggatcatctattatttagataatccttgaccaacatacatttccagcaattcggcgatcgtctctttttcaagaggcggatggtttttttcccagtcaaatatcagcgcgatgtagagcttgagcatcacaaaagcggtcagttccggatcacacggtttaatgcttccgttttcaatggctgtttctatcttttctttaatgtatgacagaatggcccgctccattttcgcaatgacatcctgaacggctattgtaccaatctcagcgttctcctgaaaaattttaatagtcagctggtgtgtttttctgaattccaaaatcgcgataagcgcccggtgaacattttcgtgaaatgaaagctccggtttcatcgcttcgtctgcgtgttccttcatttctcttaaaatagtggtgaaaatatcatcaaacagttcttctttgtttttgaaaaacgtgtagatggttcccttccccacatttgcaagctttgccaccagatccattgtcgttgctttgtagccgaattgtgtaaaagacttcgttgccgcttccagaatgagctttttccgatcgacggacatgtttcccacctcgttaaattgaccgtttgaacgttttagtcattttgtacataagataacttatcacagtcgcagagaagattcaaatgttttttctctttattggtgttccctttacagaacgggaacatgcaaaaaaacctccgttttacgataacggaggctggtacgtttcaaataaataagccagtgaatcatatacggcggcttttccctggtcgatacagtcggggatgcccaccccttcgaaagacgcgcccgtcgcgtatacgcccggataggaagctttcagcgcatctctgaactctttgatgcgctccttatggccgacatggtattgcggcatgctttcgttccagcgggtcacacaggtcatttccggttcgccatttattttcattacttttttcaaatcttccattacgattttaatgatctcgttatctgaaagatctacgatggattcatctccggcctttccgacgtacgccctgagaagcgttttgccctccggcgccgcgtgcggccattttttattcgtccatgtgcaggccgtgatggagaaatcactgtttcttgagataacgaatcccgtaccttcatgctccatcttgacggctccctcaggaaaacctaaggcgacgttggcaacggacgtagaatgcatgtctttgagacatgaaaccgccggcagatcagaaagcattttcgccgcggctttatgcggggctgtcactatgcatccttccgcatagagcactttgccgttatcaagcgtcactgaatatcctttctcctcgcggccgatatgggtgactttcgttcctttcatcacctttgtcagcgtaagctgcttttccagctcctccaccaacgtttgaagccctgtcgtcagtgttaaaaactggccctgctttttggccgtcagctgctgtcccgaaggctgcggacgtgattttttcataccgagaatcaggcttctgtgcttttgctcagtctgatagaattgcggaaacgtggacatgaggctcagcttatcaatatctccggcataaatccctgataatagcggttctattaaattctcaacgacttcgtcaccgacgcgtctgcggaaaaattcacccagagactgatcttccttcggtttgctcgcaggcaggacaaagtcaagcgccgcccgcgcttttccgggaacagaaaataaaccggtggagatgaacggagcgattttggtcggaatgcccatcaccgcgcccttcggcatcggatgaagcgtctcattgacgagcacgtaagactggccggtcgcattgttgacgagcagatgctcaagccccaaatccttaacgagctgcggcgcgctttttttcctttccaaaaaagaatccggcccccgctcaatgatgtagccgtctttatgcgccgtctgaattttgccgcccgctctcggtcccgcttcgatcagggtgacctcaagcggcagctgtttttccttgatttctttttccatgtagaaggcggcggctaatcccgttatgccgccgccgatgatgaccagatgttttttatcgccactcatttttatcgccttctttaccgtttaattctacttgtccagctctttcagcacgaccgctgcaagcgcgtcgataaattcaggctgtgcgttcggcatggccggacgatagtagcttgcgccgacttcttcggtcacagctttgcattcataatcattatcgtaaagcacctctaaatgatcggcaacgaagcctgcgggcacgtatacaaatgctttataaggatgcttttgatacagctcgcgcgtgagatcctgcacatccggcccgagccacggatcaggggtgttcccttcgctttgccagccgactgcgtaatcggtaattccggcgccttcggcaatcagttttgcggattcctccagctggtcaggatacggatcgccgtattctttaattttttcaggaaggctgtgcgctgagacgatcagcatcgcgtcatcccgttcttctttcggcattgattcatacgttttcttcacctggccgacccaataatcaacgaatttcggttcatcataccagctttcaacagacttgatggtcaagccgccgagcttctccgcttcttctttcgcgcgtttgttgtatgactggacgctgaatgttgaaaaatgaggggcgagcacaaggctgacagcttctgtaatgccgtctttatgcatgtccgccaccgcgtcttcaataaacggttcaatatgttttaatccgatgtacactttgaatgttacgtcgtcctggatttcatttaaacgctgtgcgagcttctccgcctgctcctgcgtaatttttgccagcggcgaaatgcctccgatcgcttcatatctgtcttttaagtcttgaagcatgtgcggctcaggctttcttccgcgtctgatatgtgtataataacgttctatgtcttcttctttgtaaggcgttccgtaagccatgacgagaagtcccattttctttttgctgctcatttagttaaacacctcttttgatggtctgtctaccttgattttgacaggaaaatcttcttataaccaacgatctgctcaggaagattgttccgttttttgggccgcggagtattcatgtacaaacgccgtcagctttttcagcgttgccggattgacatcagggaatacgccgtgccctaaattgaaaataaacccgtccgttttcatgccttgatcaagtatcgctttcgcttttttctcgatgacttcccaaggcgcaagaagaagcgacggatcaagattgccctgaaccgtttttgtaatgccttgttttctggcgtcatctatgccgagtctccaatcaagaccgacgacatcaagaggaaggtcatgccaatccccggccaggtggcttgcgcctacgccgaacatgatcagcgggacttgctctgctgaaagctcccggaatattctgtccatcaccggttttataaactgccggtaatcttcgcggttcagcgcgccgacccatgaatcaaaaatctgaatggcttttgcgccggcattaatctgcgcttttacataaacgataatcatgtccgccagcttgtccatcagcatttgccacgcttgcggcatactgtgcataaacgcttttgttttgttgtaatttttagaaggtccgccttcaatcatataactggccagcgtaaaaggcgctcccgaaaaaccgatgagcggaacattcagctgttcgtttacgagtaatcggatcgtttccagcacataaggaacatcctgttcgggattcagttcgccgagcttttcaatatccgcagcagagcgcaccggctgatcgatcaccgggccgattccgttttttatttcaacatccactccgatataaggaagaggcgtcataatatctttatataaaatggcagcgtccactccgtactgctcgaccgggagcctcgtcacatacgcgcacagctcgggctgatgcgtaatttcgactaagccgtacttttctttcagcttgcggtattccggctgagacctccccgcctgtctcatgtaccagacagggacgtgatttgttttttctccccgtgccgcttttaaaaacgtatcattaaacgcttctcgtttactcatctgaatttccacctttcctcctgcaaccatacgttcgtgttcttcgcccattacactataccttgttttttctgaatggtatagaattgaggcttaatgttcaaaaaatcgccgaattcatgattaagaagaaaaaagcttcggctgaacgtattccgttccctctccttcttgattcgtctgtgaattatatggaacgactttgtatgaagcccctgaaaacagattggcgtacggtatgtcaaagttgccttttcctttcaccgaatccagaagcttgtcttttccgtctttcttctcatatattcggtaaacaacccgatcatccttttgaatatcccattttaattgaaccgtaatcagtcccatcgccttaaatgtataacgggccgacagggattttaccgcctccagctcaatcgggctgcccagttccttcacattttcaggctttttgaatgtccggccgttttcacccgcttttgtgacgatatctttaaagagtctgaccgggtattggctgccgcctttcaggtaatgggttttatccgttttgtcatagcccatccagacggctcccgtcagtccgggagtgtatcccgcaaaccaggcgtcctttgtggcgccggggatgccggtaaatgtggtcgtgccggttttccccgccaggtcgccttgatagctgccttgtgaagcggttccttcttttacgacctgctgtagcattctcgtcatattccatgccgtctgtccgctgaagacgcgcgttttgccgttttttggcccggataacgtttctccgtcttcgtccgtgatgttctctataaaaaatggctttgtatacattccgtttgccgcaaaggtatgataagctccggcaagctgaagcggagtgacgccttcagacagaccgcccagcgcaatcgcgagtccgttgtcagaaatgttcatgccgtttttctcaagatacgattttcccgtatccacgccgatctgcttcaatgtccagacagcgggcgcatttatgctgtaagtgatcgcatcctgcatcgtcacttcccccttgtactgtccgtcataatttttcggttcatacccgtcgtaggacgtcagtttgtcttggagaagcgaatacggtttgaacttgtcttcctgcatggcgggcccgtatacggcaatcggcttaaacgttgagcccggctgccgcttcgccgtaaccctgttgtatccttttgccacatagtcgcgcccgccgaccgccgcgcgcacgcctccggttttattatcaataaagacggcgcttccctctgccgcctgatccgtccccggaaaatagccgctttccttcatgagggtatatgccgctttctgcagcttggaatcaagtgacgtccggatcgtatagccgccttgaagcagctgttctcctgacatcgaataacggtcttccgcctccttgatgacaagatcgatataactgtcaaaccaaggcgtttctgatgttttcttgacattaagccccaatgtccggccctgggctctgacggcttccttggcgctgatatagccttgatcgttcatcattgcaagaatcgtatcgcggcgttctttatttttatccggatgctgaatcggcgaatagagagatggcgccttcgggatcgctgccagaacggctccttctgcaacggttaaatcttttacttctttattaaagtagtagtgggacgcggcttgaatgccgtaaacgccatggccgaaataaagctggttcaggtacatttcaagcagcttgtccttgctgtaatcacgctcaagattgatggcgataatgacttccttcgtcttgcgcaaaaatgttttatcatgagtcagaaaaatgtttttcgccagctgctgggtgatcgtgcttccgccctccaccttgccgcctgctaaaacatcccggaacaccgcccggccgacagacttcacatcaatgccgtgatgttcgtaaaaccgtttatcttcaacggcgataaaggcatctctcacatcttccggaacctgctgaatggataccggctcgcgattttccgtatagaggctcgcgatttcatcaccgttttgatcgacgatttttgaagatgcgtgcagtattaatttcttttcatcgatgacataatggccgagaaatataatgataatgtatccgattaacgcgagaaaagcggttgccgccgcaattacagccggaataaagaatctttttttctttttcagcataagtcacctcgcctttcttaacttgtagtatgggaaatattgtttcgaattatgtcagaatgagtcgccaatagaaacttataccactcttttgatatactagcaagcaggaggtggctgatatgaaggtttatattacatatgggacagccgattttttaaagacgattgccaagaaacacccgagtgagaatatggtgctgatgcaaggggaggataatgcggttttaattcatgaaacaaatggagaaaccgtttttcaggcgccccattcctatgaaagcatcgacagcgtcggggaaatcaaaaatccgggctacgccgtcctcaacaacatcgccgttacccaggaaggccgtccgctgtttgaaaaccggtttaaaaaccgcgccggcaaagtggaaaatgaacccggttttaaagccatccgcgtattaagaccgctcgaaggcgatacgtatgtcattttgaccctgtgggaagaggaaaaagcctttcaggattggcagcagtcaaactcttatcaggaagctcataaaaaacgcggaacatctgccggcatcgacacgacgtctattttttcccgtccgtcttatgtaaccgcttattacgcaatagactaaaaaaccgccggagattctccggcttttttgatgtcccgattttacgcatccttctttgcaccttccgcccgcctatgaataccctgtagcaatcctatttataaacggagtggttcaattggggatcggcgtctactcggtacatctgctttatgttgcttttatcgcggccattatcgtttttatgcttctcagaaaagatacaacctttatttcactcgccggcatttttgtgattgcgctatggacgacgcattcattctccgcttcggtcagcagcctgtttcacagctttacgtatgccgccggagaattgctgccgacgatttttatcatttgttttatcgtggcgatgagcggccttttgaccgaaaccggtattaatgaagcgatgatttctccgtttgcaaagctgatgaaagggccggctgtcgcgtattgggttatcggctgtctgatgtttgccatctctctttttttctggccgtcacccggggtggcgctgatcggcgctgtgctgcttcccgcagcgatccgggcgggcctttctccgatcgccgcggctatggcgatgaacctgttcggccacggattcgctttatcgggcgattacgtcattcaggcggccccgaaattaacggccgacgccgcgggcattcccgtgagcgatgtcatgcaggcaagtattccgctcgttttgatcatggggttaacgacgacaatcaccgctttcttcctcatcatgcgggatcgaaaaaaaacgaaggcccccctctccttggacagctccggttctttggacacaagtatgtatctgccgaaaaaactcagggtgatcctggcggttttcattccgcttgtttttctcgccgatattatctgcatgatcgtataccgcctccaaggaaacgatgcgacggcactcgtcggaggaaccgcgatcggcattctcctgatcattcatttcattgtatataaagagcggcatttagaaaagatcaccgagtattttatcggcggttttcaattcggatttaaagtattcggccccgtcattccgatcgcggccttcttttatctcggtgacgcggggtttaaaaatattttgaacaccccgctgccgaaagggtctgcggggatcgtcaatgacctcggactggccctgtcccattcttttccgatgtccggagaattcgccggcatcgccctggccgcagtcggtgcgattaccgggctcgacgggtctgggttttccggtatatctcttgcaggctcgatggcaaagctgttttccgccgcgcttcatacggacccgtccgttttaacggcgctgggccagatttcagcgatctgggtcgggggcggaacattggtcccttgggcactgatccccgctgcggctatttgtaaagttgacccgtttgagcttgccagaaaaaactttatcccggttgcggccgggctagtcgtcacaacgatcgccgccatcatcattctcccgtagcaaaaggattgaaatcttctgacattttctatacaatcatgggaaaagcagacgagggggcatcgcttttgacgttaacgacacttcaaaaaagcttaaacgctcagcttgacgggctgtatgaggaaatggttgaaatcaggcgtcactttcacatgaatcccgagccatcctttaaggagaaaaaaacaccggcgttcatcgcctcattttatgaaaagctaggcgttcccatccggacgaatgtcgggggcaacggtgtcacagcctatattgaagggagtgaaccgggaccggtcgtggcactcagagctgattttgacgctttgccgatacaggatgaaaaagatgtgccctatgcttcacaaattcccggcgtcatgcacgcctgcgggcacgacggccatacggcggctctgctcgcggtcggaaaagtgctgtaccgcaaccgggaaaaactgaaagggtcatttgtgatgatccatcagcacgccgaggaattatctcccggcggagcaaaagcaatgattgaggatggctgcctcgagcatgtcgatgccattttcggcacacacctatgggcgactgaacccgtcggaacggtcttatgccgcccgggcgcagtgatggccgccgctgacggctttacgattaaagtcatcggcaaaggcggtcacggcgcgattcctcacgatacgaaggacgccgttttaatcggctcacaaatcgtcacggctcttcagcatatcgtcagccggcgggtaaatccggtgcagccggccgtcatctcagccggctcgttcatcgctgaaaatccgtttaatgcgattgccgatcaggcagtcatatcaggcaccgtccgctcgtttgacgaaagtgtgcgcagcctgctcgaagcagaaatagaagccgtcgtaaaaggaatctgttccatgcactccgcttcctatgaatatcgtttcaaacgcggctatcccgccgtcgtcaatcatcctgaggaagcggcgcacgctgcggcagccgcagcggaaacagagggcgtcacgaaagtcgttgaaggagagccgcagatggccggagaggatttttcctattatctgcagcatacaaaaggcgcttttttctttacgggcgccgctttagaaaatgcggaaaccatttatcctcatcatcatccgaaatttgattttaatgaaaaagcgatgctgacggccgccaaggtgcttatcggcgccgcggtgagctacccccgatagggcataaaaaacagccggtacattacgtaccggctgctgtgattcttaaatgaaaaacgtgtcttgccgtctcaccgagctgtgacagcagtttataattggccgctccgcccacggcggctccgacaaccggcaaaagctgaaacaacttcaccacgtccagataatcgcggtattcctgctgaagaactctccaatcgacatcatgctttttcgaatcccattgttcaatcattgagtatatgcgtttccgctgttcaccgcttgagaaagccagctgaaaaataaacagcaaaaacaatcgctcatccctgtctttcacatcatagccgtaaatggaggcaagatcgaacagacatttcattttaatggatagcagcaaaggaaaatcagccatccctaaaaaaattccgccggcccccgtaccgataccttcggctgccgcgaccttttggtacgatacgatggtttgtctggcgagggcatctttttcagcaagcgtcataccgtttgtatcccgcttgcttttcaccagatttgaacccgccattgttgcttcggtcattttttttatgctttctgtgataacggcatgaattttatcgggaatccgctcatttattttcgcctgcattcctttagaaaaacgttcaagcatagaatctttgcgcaaaaaacgcgctttccattgcagtgcttcctgtatcagctgctgatcgtcggtcatctgtgtctccttctttcattgaggtctcaaaaacccgatagattacagcttgccgtactttttcaatcttccgcccatatacgaaggcatgatcacaaaaatcagaacggctgaagcaacagccgcatacagcgccccgctgactcccgcggcataagctgacgctgcacagaacagcagcgcctgcacggttaatgccgatttcatcagcgaaaagaaactttgcagcttcgctttctgattgaccgggtaaagctcctgcagagaaaggtgatgaaaatgcccgaacagcggcagaagctgtattcccgtaataaagacggtaaatacggttaacgccgccgtgatccacggattggcggaaacgagcataataatcaggataaaaataatcgtgagcctgacctgaatgccgagataatcatttgaacgcagaaaggcccgcgcatacatataggagaacgttttccgctgttcaaatggaatcattctgagcaaaaagtcgagatacgcccggcgttttgcctgtttcttcaggtgaggcacatcggtaaacagattggcgattctgtaaaaccgctgcttccttcttaattcatattcaatatgggcttcccattttaatgatttatgttttgcggccgatgtgaaatacacataaaggccggccatcacaacatagacggcggcagcgtacacataaaacgactgtaagacgaagtataaaagcagcatattgcagataaagcgtatgaccgcatccatcattttcatgcttctgtcattcataaacgtcatccgccactccatggcctgattccacgcttttaccgccagcatctgaataaatacggcggcatacgacgcaagcgacgcccccggacttacagcgaaaaacaggggcatgcatacaaccgacagggcaataagcggaaacagctgtgacagatagctgtacttaaatgaatgtttaaagtatgtccccattttcggttcaagcggcagcagaaacacgaggtccgcttcctttagcagcgtccggacgtatgaaccggtcagcacaaatgaaaagagcaccgccatcacccaaaatgacggaaaatgaacgggaatgtctttgacccacttgctgtaccagcttgccgcgccggcaataaaaaagatcagcacaatgacgagatgatcattgagcatatatttcatatacattctggtttcctttatatgctcttcaagccgggactgccaaatagtagacatattattcatggccggcgtcttccttcgtcagttcaatatacaagtcatcaagagctgcgtcttccatgccgaactgctctctcagttcttccagtgtgccgcttgcccgcacttcgccgttatgtaaaataatgaaagcgtcacagtagcgctctgccgtagccaggatatgcgttgacatcagcacgcttgatccggcttttttcgcggcgtccatccgctccagcaatgcattgatcgcaagcgggtcaaggccgagaaacggctcgtcaatgatataaagcgaaggctccgcgagaaacgcgcacatgatcatgactttctgcttcatccctttggaaaagtgagcgggaaaccatttcagccttttttccattctgaattctttcagaagcggaggaagccttttttcaagcgtttctttggaaaggccgtacgccatggccgtcagctccagatgctctttgagcgtcagttcttcatacagcaccggcgtttctgggatgtacgtaaattgcgagcggtagctttccttatcctccgaaaacgtcttgccgttcagctcgatcgcgcctttatgcgggtccattaatccgataatatgccggatcgtcgtgcttttgcccgcgccgtttaatccgatgagtccgacaatctggttcggctcaagggtgaatgaaacattttttaagaccgggtttctcgtataaccgccggttaagtcttttaccgatagcagagacataatttctccccttctgattcgtttttcttcatagtaccaaaaataaagtctgatttgaaacgattccctttttttctcacgtgaaaagtgtgcatagttatcgttttggcggacatcataatatatgtagaaggaaacagctttaatcaactgaaaatgaggtgtttataaaagacgtcttagaacagttggatgaaaatcaacatgtcctgtgcttacaatttcttcacacactgctttgatgatgttcttcattcatgatgaaataatcaaatgaggtgtttgtcccaggaatgattaagcagacccataagtcttcattttaaaaacaaatgaggtgcttacaaaaggcatattcaattttctgtgataaagctcgtacttctgcatcagggtgaacgcgcagccgttcatcctgttttttgttttggccgtttttgtggtacgatgagaatatacatatatttcttttcagggaggaaacccatctatgcacaaagcggacgattgtattttctgcaaaatcattgccggtgacattccgtcttcaaaagtatacgaaaatgaacacgtcgtggcgtttcttgatatcagccaggtcacaaaaggccatacgctcgtgattccgaaaacacatatcgaaaacgtgtacgagtttacgcctgagctttctaaagaatattttgaagcggtgccgaaaatcgcacgcgccatccgcgatgaattcgagccgatcgggctgaatattctcaataacaacggtgaaaaagcgggccaatcggtgttccattttcacatgcatatcattccgcgttacggaaaaggagacggtttcggggctgtctggaagacccacgccgaagactatacgcctgacgatcttcaggagatcgcttcaaccgtcagaaaacggcttgcctcatcttaaagatgaggtttttttgcgtccggaaacacaaaaaacataaattatattttttcatatcaaaaaaatcaaaaaattgtgataggataattgtattatttcttacactaaagcggaaaacagggagagatcgtaaacatggaacgtacaacgaatttcaatgcaggacccgcagcccttccactggatgtgctgcaaaaagcacaaaaagaatttgtcaacttcaatgataccggcatgtccgtcatggagctgtcccaccggagcaaagaatatgacgcggtgcaccaaaaagccaaaagccttctgaaagaactgatggatattcccgacgattatgatattttatttcttcaaggcggcgcaagccttcaattctccatgctgccgatgaactttttaacgccggaaaaaacggcgcacttcatcgtaacgggcgcatggtctgaaaaagcactcgccgaggcgaaactgttcggaaacacatccgttacggcaacaagcgcagattcaaaccacaaccacataccggaagcagacctctcaggaatcaaagacggcgcctatctgcatgttacgtcaaacaacacgattttcggaacgcagtggaaagagttcccgaattcaccgatcccgctcgtagccgacatgtcaagcgacatcctgagcagaaaaattgatgtcaaaacgtttgatgtcatctatggcggagcccaaaaaaacctcgggccgtccggcgtcacggtcgtcatcatgaaaaaatcatggcttgaaaacgaaaacgccaacgtccctaaaattttgaaatactccactcacacaaaagccgattcactgtataatacgccgcctacatttgcgatttatatgctgagcctcgtccttgaatggctggctgaaaacggcggtgtcgaagcggctgaacggcgcaatcaggaaaaggccgacgtcctgtacggcacaatcgacgcaagcggcgggttttacgcggggcatgccgcaaaagacagccgttctcacatgaacgtcacgttcaccctccgcgacagcagtctcacgaaaaaattcgttgaagaagcgaaagcggctaaaatgaccggactcggaggccaccgctcagtcggaggctgcagggcgtctatctacaacgccgtcagcctggctgattgtgaaaaactggctcagtttatgagaaagttccagcaggaaaacgaataaatttcttctaacataacggttcctttgatatactgtttgcatatcaatttttccggccatcgcaataaatgacgagcatattattggatggcgaaaaagcttagcagaggagagcttagtatgaaaacaaaagaattagtcattatggccctgtttgcggcaatcggagcggtgcttcattccattatgccgccggtattattcggaatgaaacccgatatgatgcttgtgatgatgtttatgggtattctgttattcccccgtgtgcagaacgtgctgatgattgggattgtaacgggaatcatttccgcactcacgacatcttttccgggcggacagcttccgaatatcattgaaaaaccggtaacggcgtttctgtttctcgcgctggcgcttttggtgaaaaagagcgtgaaaacagcggccgccgccgtcattacgatagccggcaccttcatctccggtttgctctttttggcgctggcccttctgattgtcggcctgccgggcggattcaccgcattggtgctcgcggtcgtccttccggcggctgcgctgaatacgatcgccattatcattatgcatccgattgtgcagacgatcttaaaacggtccaatatgattgaaacggtgaaataaccgcataccgaaacctcttccggccggaagaggttttttaatgtgtttcagcatgttttatacgagaagttttgtgaaaaagataaggaacaatgcgagggcggttcctgctgagcagacaatggccttttggcggacgacccgcttcggcggataagaagcggcctggccgagcagtttcaggtaataaacggcgcccgccgcaaagacaagagccatacaagataaaacaatcataaagacagacaaccttctccctccttttcccttaaaaaatatgctaaaataaagcaagctatgtatagaagtttattcttctgaacaaaaatgataaaagttacgagaaaaaaaacggggtgatttcaaatggctgacggacgttcccttttaacaggccttttcgtaggcggattgatcggaggcgcagcggtgttactctcggctccttcatccggaaaagagctgcggggcaaaatcaaagcgaattgcaattcaattgaggacacaatcaaacggttaaaaaaagacggaatggcgcttaaggaccagcttgtccaaacggcgaaagaaagcgcagaagtcattaaagacgtaggcggagagcttcagaccagcattaaaaggtggcaggaggaaatcaagccgcaccagcaggatctccaaaaggaaatcgctgatatcgaagagaaaatcagacagctggagaaaaccttacaaaactaatatcctatacaaccaaaaaaagtgcggacatattgcgttccgcacttttttttgcggtttaaagcctttcccagcaacggatcaagaatttattataaaattcttaaattttcatctttattaatctttattttattggcataatagaggaaaagaaaatgtgaagcaggtgatctgtattgaatcgtgttgaaccgccttacgatctaaaagaagctttaatctatacccaaaaaatggcgcagctgtccaaagcgctctggaaatctatcgagaaagactggcagaattggctgaagccgtacgaccttaatattaatgagcatcatatattatggattgcctatcagcttaaaggagcttctatttcagaaatcgccaaattcggcgttatgcacgtatcaactgcatttaacttttcaaaaaagcttgaagaacggggatatctgaaattttccaagcggctgaatgataaacggaacacgtacattcagttaacagaagaaggggaaaatgtattcgaaagcctgcttgaggagtttgatccgtcgagaaacgctgtgtttaaaggctcacagccgatctaccacttattcgggaagtttcctgaggttgaagaattaacctgtgtcatccgccacatttacggcgaagattttatggagatattcgagaaatcattgacaaacataaacaatgattttgatagtgaagacggaaggctgaagaaaaaaacagacgaatcggctgcccatgaaacggctgaagagctggaaccgatcaacagttaatcaaagtgcttcataatctcaataaattcttccatcagcgctgtataaagcccctgctcatacagagcaaaaatcgtttcatgaacatctaatttttcgttcagctgtcccgcaaaaagcgcaaggagcttgtcaaacgtcacaaagccttgcgctttttgcgactccagctcgtcctccaattcgcggcagatccgcccgacctcttctccttcttcttcggtcagccctttttcaatcatcatcgcataaaaagggtacttatccatatccaccgttttcaccagcaattgtatgtaatattctaaacgcccgatacgctgatccattgaatccatccgtttcacttctttctatctttaatcttattttagctgataatgaatggagaagaaaggttaaaccgtacatttccatgtttcaccgagctcttctgttcttctctttccaggtttatttttttctttaaaaaaggattgattttttctcctgaagagagtaaattattttgagattgtattccatctttgtacggaaggatgactctgatgaattgctggaaaaccattaatctgatcaaagattatggtgcggttcgtttattattgactgctgtaggttttatgatcctgttttttatatgcaacttcttggcattcgggctgctgcgtccgaatatcagtttaagtgacgggcacgtgtttgctttttgtgttctgctcgttgttactttatttgtacataaagtcatacatgtcctgccgatgatctgtaaaaaaagaaaaaaggaaatgaaaatgtacttcttgcggatgccgacatggaaaggcataccgaaaacaacgatgctgatttcaacgatcagcccgtttttattcattacgccgttattgttttatgccggactggcatttccgagacacgctcattacttttatatgatttcgagtattcatgcggggtattgcctgcctgatcttctgtttgcgctccatctggtcaaagcgcccaaatcatgtctgattgaccaggaatccgacggttttgatattttagtaaaaaaagtgccggagtcttgatgtcccgctgatttttcaggttacattctatcttttttaataaatatttggtaatgtaatatgggagcagttcagagagagggggaatctcccatcattttattctattttatcgtggctgccctgtttattctttatttcataaacaggctcacaaatacattatgccttgtcagagagattcctgaagaccggcaggataaggtattccgttttattaatgtatctattttaattttactgatctcttcattcgtcgagatctcctttactgtgtaaacaggcaaaaaatatggctgacggaggtctgacccccgacagccatatttttttcttaataaagccaagaagcgccgatgatgatcaataagatgaacagaacaaccaataatgcaaaaccgcctgcaaatacttcacccatctccaaaagcacctcctacaaaacgttttatttttccaattacatcatatgcaatttacttctgaaacgattaggcgcccgggtaagaaaacggaccgcttttggaaaaagcgatccgtttcgcttaacaaatgtaagctgcacctacgatgataagcaatatgaacagtactacgagcagtgcgaaaccgtttgaatatcctccgcccatggttcattacctccttttcatgatcaatatatttgtatgtatcaggaaaaagtttgactagacgaatgccctttatttaaaatctttttacagaaagccacaatatgttatgatacgcatatgcaatttaatttggatgattaggagtgtttaatggaatgaagaaaatcgcgatagcagctattacggcaacgagcgtcctggctctcagcgcttgcagcagcggcgacaacgacgtgattgccaagacggatgccggaaatgtaacaaaaggcgagctctacacgaacatgaaaaaaaccgcgggcgcaagtgtgctgacacagctcgtacaagaaaaagtattagcaaaaaaatacaaagtatcggataaagaaatcgataacaagctgaaagagtacaaaacgcagctcggcgatcagtacagcgcccttaaacagcagtacggcgaagattacctgaaagatcaggtgaagtacgaactgcttgcgcaaaaagcggcgaaagacaacatcaaagtgactgactccgatacgaaagaatattacgacggcttaaaaggtaaaatccgcgcgagccacatccttgtcgctgacaaaaagacagctgacgaagtggagaaaaagctgaaaaaaggcgagaagtttgaaacgcttgcgaaagaatattcaactgacagctcaaaagacaacggcggcgaccttggctggttcgataaaaagtcaatggatgaaacattcagcaaagctgcattcggcctgaaagtcggacaagtcagcgatccggtcaaaacaaaattcggttatcatatcatcaaaaagacagaagaacgcggcaaatatgatgacatgaaaaaagaactgaaagaagaagttcttaagcagaaattaaacgacaactcagctgtacaggcggcaattcaaaaagtcatgaaaaaagctgacgtaaaagttgaagacaaggacttaaaagacacgtttaacacttcaacatcatcatcttctcaatctaaataaaaaaactgtgcgggctctcggcgagccgcacagtttttttatgcgatcgaatgattggagttttcttctgcatccccgttttcacctgcgggcgccgccatacggcgctcgcgttcctgttccatccgttcaatatacacccttccttctttttcaataaacgactggtcaagcttttcctcttctttagctgttgtgaaaagcttataagcactgaaaataattccgataatgcaaaggtatacccaccaaggaaaaaatagcacgtcggtttcctccctttttcacccagagtctttattctaagctatgcttgataaagacaagttatgagagctgaacgtaaaaaagaccgatcgtagagaatcggcctttttatcttattgatggaaagtcggtttgtagaaagaacggttttcaagcgcaaatacacgctctgtgtattcgcccggcttcacccgttccagcgctctgtccatcatgatcatttttgcatccagattgtcaatgtagtgcagaatttccgcttctttcaccatcggcggtttcgggcttccccattccgcttttccgtgatggcttaaaatcaaatgcttcagaatcagcacttcttcagcgtcaatctgaagctcttcggctgcttttgaaagctctgtcaccatgatcgaaatgtgcccgagcagattcccttccacggtgtacgttgtggagacggggcctgaaagctcttttactttgcctagatcatgcagaatgactccggcatacagtaaatcccggtcaagagacggatacagatcggcaatcgcttttgccaggttcagcatggacactacatgatacgcgagcccggagacgaactcatggtggtttttagccgcagccgggtaatccataaactcagccgcatattttttgaccagatgtcttgtgatccgctggatgtttgggtttttcatttcaaaaatgtattgagtgacggtttccatcatttcatttttcggaatcggcgccgtttccagaaaatcatcaatgctgacattttcgttctcgccggccggccggatgtttctcagcttaagctggtttcgtccgcgatagtgatggacatctccgatcaccttcacgatcgtctgcgccgcgtatgttacttcatcagtcggcttggcatcccacagcttcgcttcgatatctcccgattggtcctgcagcattaacgtcaggaatggttttccgttgcttgcgattcccttagtcgaagatttaatcagaaagtattgatcgacctgctcgccgacctcgtgcagcataataccttttgccattctattaaaagctccctccatatcttacataataccagtatagcacatacctcttttttgaaaataaactcttttatgacaggagccgcatgacttgtccgctgtgaaaagaccggctgacatgctcatggcaggtgaaataaagtatctgccgcccgccttctgaaagctgattcagcacatcaaacagccgctgcagcctctgcctgtcaaaatggacaaaactgtcatcaagtaaaaacggcagtgataccgcagattccctctctgacgcaagggcaaaacgaatcgccgcataaagctgctcgcatgccgcctgtgagagttcgcctgcagaaaacaccgttccgtctttccgcatgaccataatggaatcatcagcctcggagaaatacaatttgtgatagcgtccgtccgtaagcggtccgtataatgcaccggcggtttctaacagacggggaagcgtcacttttttatgccgctccattttttccctgatgatgtgtctgaccgtctgtaatgcagcccactctttagcgttttttttcacgcgctccttctgcatttctgtctgctgttttaaatcggatacaagccccgaggactccagctgctcttgcttcaccgttaataaagcggtttgctcacggagctgggcgcttttttcctcaagcgtttttttctctgtttccttctgaacgactgtatgttcaagttcggacactgtgcggctcatgtacggctccagctgttttccgcctatgccggacaagtgcgttttgatttcgcgcagctgccgctctgtttcccggcggctttcattcagcctggcgagttcacaaaagtgttcgcggttgtttgcgcctgccgccatgaaaagctgtttgacctgctgttcgtagtaatgaacttcttcgtttaattcacgcatttgctcttgtgcatgcagcagatccgtttcgagcgcctgttttcgttttgcttcctcacgggcccgttccgcctgcgccagcaaaacgtgcagtctttcttttacggacagctcccttccgtctgaaggactcagctttttgacccggtcctcaaatgctctttgcagcttttgcagcctgcccgcttcaatggtcagctcatgcttgttaaggatttcttttttgacatctttcatcacatgatatgcgtcaagaagatgggaaggacttcctgaaaaccccagttcattcataaaaagttccgcctgtttttcagacggcgccatttcggcctcccattcttcatattggcggatgactctttcatatgccgcttctttctgttcgagcacggcttgatccgcaatcagctgctgccggtgccggccgtcacgccaaagctcttcctgcagaagatcagccgcttctttggagatcgccggcttctttttcttgtgtccgggccctcctctttctgacggcagcggtttttgcatgccggacagcatatatagcagcagagcaccggtaaaaagggcagcgggcagccattcctttaacatagcgaaaatcgcaatgaacagaatgcccgcacagagaaagagctttttttgtttggcgcgctgtttttccagatgctgtacatgtgcctgccatttgtttccttctgtatcagccgtttgcttatatgattgtaaagcggcttctttttctttcctgacagcggggtccaaaatgttttccgccgtcacggcatgttttcgttcggcttcttccagctccagccgcgcttgttcgaaaatcgcatcaagctgtgtctttctttctctagcctgtccggcgctctgcacggcttcctgcagccgccattcatattcataatcggtgttcagtgaaagaatgccgtcctcctcatgtcttccgagctgctgcaatcctgacgaaacgcgggcagatgtctgccggatctgtgattggatggcggcaagctgttcgccgcgcgattcgtacatatgctgctcgccggaaagctcctgcagctgccgctctttttgcagcaagtcctcatttggagcgagcagatcagcctgccgcctgagttcagccgcttttgcccgaagcccctcaagacgggccgctttcggatggagatgcgattcgtatttttcaagctgatgcattccgtccttcgggaattgcttcaatgcttccggataagaagaaagttcgctttccaaggctgtttttttgtctgcgagcggctttgcttctatcgccgattttactgttttgatttcttcagttatgtctttcaatcgtgcttcggcatcctgcaaacggccgccggcgctttttttctcttccagaaggctgtgatagcccgcttccgcagcttccgcctgtttcagctgggcgctgagccgctttaatgtatccaactcctgatttaagcgggggttccgcccgttcggcttatacatcctgtcaagttcttttgccagtcgtccgtcaagctttgccgccgcttccgacccgaataagctcgaatacaggagaaactcgccgattttgtcccggttaaaagcttgaatctcctgcagtccgaatacatcgaacgaatagatcgcttcgtacagcgcccggtctgtatcggagagaagctgtttgagccattctccgtccttgatttcgcctgaagccgtatacactctgactttttcggcggcgccttttgtccgttcgattttgacagcaccgtgatcgccatgcttcaattccacagtgccgccgtaaaccccgccgtttttcggttcgtatttttttgatttcggaaaaccgaacagcacgcttttgatgaaggacatcaatgtcgttttacccgcttcatttaatccgtagatcacttgcacgggagaatctgacagctgaaaactccggtcagaaaattttccatattggtaaatatgcatcgccgttattttcatcgctgaagctccttcatttggcgtcttaaaacggcttgagcctgccgcttaatatccagtatctcttcatctgtaaatgaagccatctgacgccggtatacgggatgacgctcaagggcttcaaatacaccgctcatgtccgcgcattgttctatgtcctgaagcagccctttaaaaaacggatcgggcggcccgctgtctgtttcgtccgtccgatcctcaagcgcaagcggccagacgaaacattcctcttcggcctcttcctcctgtaaagcggaaagaagctcctccgcaatgcctgcgggcgcctccgtccaaaagcggggcgccgcgccgcgaagcaccagcctgacacatgccgggcggcccgccgcgcgcaagccggagaatgtatccgatgcggttttcagaagtgaagtcatatgttcagctccggagatatcaagatcaatctcctcccataacacatcatgcgcttctttgaattcccaagacatctcaccgtttgccgcccggacgagataatatcccttaggcccggtttcttttaaatgccgggcttgaatattcccggggtaaatggcggcgggatgctgggcggacagaacctgccgtttatgaatgtgtccgagagcccagtaatccatgccgcttttttcaaggtcttctttcgtaaacgggcagtacgggtcatgcccttccgctcctgataacatgccgtggagcatgccgatatgataaggcgcgccggtcattttccggtaacgggccgcctgattgaccgttacgcttctttcctgatagctgcatccgtatatgcttgccgcaagctctccgtttttaaagaaagatttttcctccggtgtatccgaggtgaagatatgtacattttccggccattcaatcggcgtccacttaccgcccaaatgatcatggttgccgaatatgacgaacacttggatatccgcttcctgtaatctcgcaaactgttttctcaaaaacagctgggcttttaaacttctgttggcttcgtcaaacagatcccccgaaagcagcacgaaatctgcctgctcccggagtgccccgtccgtcagtcggcggacgctgtgaaatgtgctttctttaatacgcgcatataccggttcaggcagattcgaaatgccgtaaaacgggctgtccagatgcaggtcagcggcatgaataaacgtcagatcagccatctcgccctcccctttctgcaaattgaattacccttattttagcaccgtttttatacgaatgcacgttctgtaaaataaaaaaaacagcccggctgttccgggctgtttcacttatttcttggagatacgcagcgcttgtttgatcgctttgaatccgctggcgtttccgtaaatcaaaacgccgcctttgtaaattttcgcgccgaccgctgcaaagatcacgatagtgagcagtgtcagggcgattccggccgcagcctgccaaaacgggatatcgagcatcccgacgcgtaaaaacataatcatcggcgtgaaaaacggaatgtaagatgtaacggtaataaaaccggcgtcaggattgccgatgccgaacatggcgatcataaaacctgccacgactaaaaaaaccatcggctgaatcgtctgctgtacgtcctctatccggctgacaacactgcctagaaacgcggcaagcgtcgcgtaaagaaaatagccgagcaaatagaaaatgacggcatagactatcgtcgagacgggaacatccgtaaaattgagaaatgcactgatcggcgacgacgcatcattttgagggttcagcttcagtgagagataacccgctgcaatcagcaccgcaaactgtgtgatccccacgagcgcgataccgaacagtttggcaaacatctgctgaatcggcggcatgcttgaaattaaaatttccatgacgcgggacgatttttccgtcgccacttccatcgcaatcatgcttgcgtacatgataactgagaagtagatgacaaacagcatgatgtatacaagccccattacctgaccgagctcttcctcagacttcgcccctttttccagcgcgtctttgctgacttccggcggagtgtagaggctgctgactttttctgccgaaatgccaagcttggcggtttcgacagcggtttttgtctgggttaaagcctgcttgagcagtttatacgctgattcatcggaaatggtcagcgccttgtatgctcctgttatcgtacctttttgatcttgtctgatgataaacagtccgtcccattcaccgtctttgacacgctttacggcatctttttcggactccttcgtctccattgcctgcagatcattgtctgtatccgccgctttaagctgttttgcaaacgccgggtacagcccgcccgtttcatcaatcactgcgatttgctgcttgccgtcatccgattgaaacacggatataatcgattgcaggttggtcaccgctaatactaataaaacggtaatggcggtcgaaataatgaatgactttgtcgtgattttgtttttatatgtatgaaacagcataatccaaaatttactcataaacggcccccaccttttctataaaaatatcatgcagtgacggctcttccaattcgaacttccgtataaaacctttcccttgcagcgcccggaaaatatcctgagaaaccggttcattcgcgacctgcagtctgatcccgtcatttgtttccttccatttcacgacgccttcatgcgtttttaaaaagctgaggtcatcatctgaatgaacggtgacattttttttgccgaaagaccgcttaatgtctttcagattgccttggacgacgggttttcccttctggagaatgcacaaattctcgcaaagctcttccacatgctccattcggtggcttgaaaaaacgatggaaacgccgctgtttttcaaagaaataaccgcttctttcagcagctcgacattcaccggatcaagaccgctgaaaggttcatcgagaatcagcagttcaggcttatgcaggacggccgaaatgaactggattttctgctggtttcctttcgacagctcttcgactttcttattcttgtaatctgtaatgccgaaccgctcgagccatgtcatgagctctttttccgcctcttttttgcccattccttttaatctcgccagatagacaagctggtcactcaccttcactttcgggtacagcccccgctcttccgggagatagccgattttttcactgatggaataattgaccggctgccctttccaggtgatatgcccgtcagtcaggcttaaaagacctaaaatcatccgaaaggtcgtcgtttttcccgcgccgtttgcgccgagcagcccgaacatttccctttcaggtatttgcaggttcaaattgtcaacagcggtaaagctgccgaatgttttcgttacgttttcaattgtaagcacgaatccaactccttccttgacccattatatactaataatgggtaaaaattaatggaggattttaaattctttatcagaatatcattctataaagggggtgacatgatgggacaatatgtattgaccgcattccatgcgtcgggagaaacgctgctgaatgaacgaatcgaagcggataatgaggcggaggcgaaggccgccggagaggctttattaaaggaaaaaaagcttgagaacagtactcatcgcttggtaaatgaagccggaaagctgattttattccacagataacagaagctttccggcttctgtattttaccggttaaattgcggcgtccgtttttctaaaaaggcgcggatgccctctttatgatcatccgttcttctcatattttcctgggcctttcgttcaagagacaaaacgtcttttaaccggctgatatggaggctctgataaatagccttcgtttcaatcatcgctgacagcggcgcatgcagcaatcggtcgatatacggttgtgccccctccgcaggacctccgctgaacagcccgtcggccagcttgagccgcacagctttttcagcaggcaatttttcaccgctccaaatcagttttttcgcttcgatctcaccgacgcgtctcattaataaataatggcctcctccgtcgggaaccaatccgatgccgatgaaattcatcgcgaggcgggcgttttcttcggcgagcaccatatcggcgcacagcgcgaaactcagcccgagccccgccgcggctccgtggatggcggcaatcacaatttttttcatatcatagagggtcagcgtaatggattcgatcattttcatgagccgttcatattctcctgaatcatgatccgacgtcatcatctgaatatcaccgcccgcggaaaatccccggccttccccccgtaaaagcacgataagcgcttcgctgtcggctgccatcacgcatgcattttccaattcccggagcatttgttcattcagcgcgttgtaactgtcaggccggttcagcacaatctctgcgatctttcccttttcttcataacgaatatactgcatgtttacatcccccttgaatccgcttacatattttgttcaaatgatatattcctttctccgaagcgaaactcctttatttttcaaggtcaacagataccgaaaaatgcatatcatttgaaactgaacatacatttttatatagtgaaattgatatacaaaacaaaaggggggaaaaacaccgataatgaaatatgtgatactcagcttgttactgagcttttttatggtgctgttccccccttcggatgtcgctcttccttcccaattggtgacagaaacagacagccatgtacaaatttcggtttacccgcaggaaacggaatcggcaaagacgccggttcaaaccaaaaccgctccgcaaggcctgtcaaaaggatacggtgcgttatcccggatgatctccctgttatctgtcaaacctcttgatcaattcattgattccacaatggaaaggacatgcgccattccgatacaataccagtcaaattacctccggcatcagaccatttctcattgccaatctgtatttacggtgtaaaaacagtatattccggagggattttttatgaatattaaagaaaacgatctgcccggcatcgggaaaaaattcgaaatcgaaacgagaaatcatgaaaaaatgacgatcatcattcatgatgacggcaggcgggaaatttacagattcgatgaccgcgaccctgatgagcttctggcaagcatttcacttgatgatgcggaagcaagacagattgccgcgattatcggcgggatggtgtacaaaccgcaggcgcttgaatcgattgaaatggcgttcagcgatctgattatcgaatggtttaaagttgaaaaaggggcaaaagcggcagggcgtacgctcggcgaactggatgtgcgccaaaactatgacgtgacggtcatcgccatcattaagcatgaccagaaaaagtttttaaacccgggcgctgattcgctccttgaaacaaacgatacactcgtcctctcaggtgaaagaaagcatctgaaaaagctgatccaagacttcctctccagagacggagtgtgatctgtttatggaccatctcgtatttgaagtcggtacggcattagttcttgtggccattgcgagtgtcatcgccaataaaattaaattctcgatcatccccttcctgatcattttaggaatgctcgtcgggccgcacgcgccccaagcgggcatcattgacctgacgtttatcgaaagccgggaagtgattgaatttttcgggcggatgggcgtcctgttcctcctcttttacctcgggcttgaattctcggtcggaaaattagtcaaatccggacgttcaatcgccgccggcggaacgatttatattctgattaatttcagtttagggctgatctacggctttattacgggcttttcctttttggaagtgcttgtattggcgggcgtcatcacgatatcatcaagcgccattgtcgcaaaggtgcttgtcgacttaaagcgcacggccaatccggaaacagagctgattctcggcatcattatgtttgaggatatctttctggcggtttacttatccgtcgtttccgggcttgttctgggagacgcgacgtctgtcggaggcgcgctgatgtcaatcgtgatcgctttcggatatatgctgctgtttttcattgccgctcgaaaattgccgcctctgctgaacaagctgcttgatatccgttcaaacgaggtatttgtcatcgtcattttcgccgcgctctttttcattgccggcttttccgaaacgattcatgtcgctgaagcgatcggcgcgctcttgctcggactcgtgttttcggagacggcccattctgacaggattgagcaccttgtcgtgccgttccgtgactttttcggggccatgtttttcttcagcttcggtctcagcattgatccgttttcactcggagatgcggtatggctcgccctcggcgccgttctgctgacgattgccggaaactttatcgccggcatgatcgccgggcgccgggcggggctttctcataaagcatcgtccaatatcgggctgaccattgtgtcccgcggcgaattctccattatcgtcgcaaatctcggcatcgccggcggcctgtccgcttcacttaaacctttcgccgccttatatgttctgatactggccatcttcggccctttgctcacgaaagaatcgaagcggatatatctcctgttgaacagcgtgttcaaatggaagacgcctgaaaagaagccgcagaaatcataaaaaaaagctgacctcttcataagaggtcagtttttttgagcaggaagaaattgctgaaaagccgtttttttattaatggagaaatgctcttttcccagaatggtattgatgattttttgatttctgtaaacagacagcttcaaattcgtagcgcccgttccgtgagcatgatcaagattcgttaatgtgaaaaaatgatgccgcctgtcgtccttaaagacaagacgggaatctgccgtcactttaaaccgtttctcatcctcccattcgatatcaggggcaattgccgtaaaccattccggaatatgaggtttaaaaccggtcgccaatatcactttttctgaatcggccgtaaaggtttcatccatctgccattgatgaaagctcagtacgcagcgcccgttttgcttttcaattttttcaagctccgccatcggctgaatatacacgtcaggcgaacctccgctgatcgatctgtgatacagggcatcgtaaatggcggcaagtgtgtcagaatcaatgccgtggcgcagtccgtccagctcagggagtgtgttcagccgttctttaaaaggcaggcggttaaaatattccacataatcaggtgtaaacatttcctgcccgagcttggcggtttccaattctcgaaatccggcggagcgtgtcacccattgcagccggctgc

SEQ ID NO: 40 - DNA, 106824 bp, Bacillus amyloliquefaciens
ttcgggctttacatgtgttcaattaatgttttcatatcgtcaggcaccggagcgtgaaaaacgagcgtttctccggtcatggggtgtacgaatgaaagccgctcactgtgaagagcctgccgcgcaattccctcattttttccgccgtacaatgtatcaccgactaaaggatggccgaggtagctcatgtgcacccggatttgatgcgtccgccccgtttccagccgcagggctgcaagcgtaaacgcatgtcccgatttttccgtttgaaaatgcgtcaccgctcgttgtccctccggcgttaccatccgctcaataatactgtcgtgttttcttccgatgggcgcgtccaccgttccttccttctgcatcatgatcccgtgtacgacagcgagataccgcctgctgacaagccccttcttctgcgctgccgacaaaagagaatgggaaagccgatgtttggcgatgagcatcgcccccgatgtatccctgtcaaggcgggtgacaagatgaaccgttgattgtacgccgctttttcggtagtggctgatcactccgttagcgatgctttccgacgggtgttctcttgatggaattgaggagacatacggctgtttattgaccacaagcacatggtcatcttcataaagaatatcaagcggaaccggctcaggcaaaagcgtttcactcacatgctccttcggaaattcaatcttaagcacatctccgtccgttaacacggtgcggacggttacatgctctccgttcacaagcaggtctcccccgccgaatttaatgtcagcgagaagccgctttgaaatgccgagctgcgccgtatattcttttaccgtcatgccagcttcccgggcagtcatgttcttttggataaaaaagttgtccaatccgtttcctctttctattcgccttttccgataaaggaatcctgcacccttttccaaaacggaaaaggacggaatcttgcaaatctgactttttcatttgccacacggcatagaatggacttcacatccttatgcagcaaggttaaatgatcaattgtgacttgaaagtcgacgtcgtttctcggtttgatgacacagttatgatgatcgggaagcaaaagcggcgagccgacagtcctgaacactctgttgttgatggatgccatttccgcaagctgaatcgccctgatggaagggtggatgattgcgccgcctaacgccttattataagccgtgcttccggaaggtgtggacagacataaaccgtctcccctgaacgtttcaaacagctggcctttaatttccacgtcagcgacgagactgccttctatgcttttgatcgtacattcgttcaaagccagataccgctcctcacgctcttcatcatgataagtgacaatcacctcaagaaggggatactccacggtatgatacggcgttttggcaatggccagaacgagcttttctatctcctgcggaacccaatcggcataaaaacccaaatgccccgtgtgaactccgacaaacgccgttttatcaagacggtcgctgtacctgtgaaatgcgtaaagaagcgttccgtcaccgccgacggaaataacgatttccggctctttttcatccaaggtcatatcaaaatcgagtaaatacgcctgtattttgcttttcagtgtatctgaaacctcgtctccttttgaagaaacggcaaatttcatgccattcccctcctttcctactggtggtctcccgcttttttctttcgcgagaacgcggcttgggcttcctggatttctccgcggatttctgacatttcttcatcgagccgtgatgcggcttctgaggcccgctgcagcctcagctttactttttcgggaatgttcccgctgtatttgtaattcagtgaatgctcaatggttgcccaaaagttcatggcaagcgtccgaatctgtatttccacaagaacgtgcttttctccggacgttgtttgtaaaggatataaaacgacaaggtggtaagaccgatatccgctttccttatgctctgctatgtaatcccgcttatcgacaacggtaaaatcttttctggcaaacagcatatttttgacgatctggatatcatcgacaaattggcacataatacgcagccccgcgatatcctgcatcgtttcaatctgatgaagcggtatgctttttcgtctcgctttttcaagtatgctcgccaccggcttcacgcggcctgtcacaaactcaatcggtgagtggtcatcttcatactcataaagggttctgacgcctttcagcttcacctttaattcttcaacagcctggcggtatggcgctagaaattgctcccattgtttgtcatccatcgtacatcccccaattccgaacctgttctaaagaaatacgcttttcactttttcttccatatctccgtagtttgcattatctttaatattttcaagaagataatcgagttcttcatgcagccctgaaagttcaaccatttttccgccggcctcaaggaccgccggttttctttggtctaaggcttttttcagatccggccagatatgttcttttataatgacatattcaaaagagtcagctgattcaagtatgtatacaaaagcaaagtgatcggaatcaacaagcatttgacctgaggctttgcgttccgctccgcttaagtcctctccgcacttcaagcggagcgcgtcttctgttaatgatgcattttggatttcaattctcttttgcataatgttctccttttttaacaaagtacagcatttattttatcatatcaaggtcgatattgataaacgtaacctctaaagagataatgggaattatacaatttttcgtcctgaaaggaagactgtcatgacccaagaaatagaaattgaattcaaaaacctgctgacaaaatcagaatttctgaagctgagtgaagcactctgcatgaaagaacatgattttaaacagcaggtcaatcattatttcgacacgaaagatttttccctgaaacaaaaaaaatcagcactccgcatccgagaaaaagacggcgcgttcgttctgacgttaaaagagcctgccgcggtcggtctgctggaaacccaccaagagcttgcggcacctgatcttgacgtcttcaagattccggaaggctccgtcaaacgtcagctggaaggtctcggaatcaattcagaacacatttgctatttcgggacgctgtcgaccgcacgcgcggaaaaagaatcagaaaaaggcttaatcattttagatcacagccgatatttagagaaagaagactttgaattggaattcgaagctgctgactgggatgaaggaaaacgggcgtttgaacaattgctcaagcaattcggcatcccagagcggatcacgaaaaataaaatccagcgtttttatgaacagaaacaaaaaaaggtggaatgacacagtgaatataacgaattgggcggcccttctccagttgcaatcagtggcgctgcaatcaatctctcatacaagcacagcttcaggcggacaatcttcagaaagcccgcttgccaatttcagcgcgcttctcagccagtatacggacacagccgtccggcagcagccggaatcaggaattttaaacggtgtgcggaccgctcacgcttcatattcaccgagaattcccgtttcatccggctccgcggctgcttcacagaccgcttccccgggcataaagtctccggatgcggcatctgatatcagcaccggaaacttttcaatagacagcgctattcagaaagcggccgaaaaatacggagtggacgaaaagctgatccgcgcggttattaaacaggaatcaggctttaatccgaaagcggtcagcggtgcgggggcaatgggactgatgcagctcatgccttccacggcagaatcactcggggtgtcaaacccgcttgatcccgtccagaacgctgagggcggcacaaagtacttaaagcagatgctcacgaaatacgacggaaatgtatctctggcgttagccgcctacaacgcaggccccggcaacgtagatcggtacggaggcattccgccgtttaaggaaacacagcaatatgttaaaaacataaccaaacagtattacgcgtaaaccagagaggcttccttcgccctctggtttttttgcggagtgaaatcttacacatgaatgaaggcgatgtgatatgatatgaaatacaagcgcctgacagaaaggcactttgtttgtagaaataaaatgttattgctaaaatatacagtaactgaagatagtaaaactgaaagataaattcgcaatgggaattatgattcctattagccatataaaggagtagtcaacatgggacaatcgtttaacgcaccatatgaagcgattggagaggaacttctatcgcaacttgttgatactttttatgagcgtgtctcgtctcatcccttgctgaagccgatatttccaagtgatttgactgaaacggccagaaaacaaaagcaatttttaacccagtatttgggcggacctcctctttatactgaagagcacggacaccccatgctcagggcaaggcatctcccctttccgattacggacgagagggctgatgcgtggctaagctgtatgagcaaagcgatggatgatgtcgggctggagggcgatattcgtgaatttctgtacgggcgtctggaactaacggccaggcatatggtaaaccaggcagaagcggaggatcgatcatattgacgaattatcagcatgagcaatacttcgcccattgccacggacatccaaaaaaaccgctcgaaatttacatgtttgtcgaccctttatgtcctgaatgctggtcgctggagcccgccataaaaaaattaaaaatcaaatacggacgtttttttacgctgcggatcattgtttccgcgagcattacatcgctgaataagcaaaagcggaaaaaacaccttcttgccgaagcttgggaaaaaattgcgaaccgttccgggatgccctgtgacggaagcctttggcttgagcaagatcagcctctttcatcgccctaccttgccgcactcgctttaaaagcggccgaactgcagggaagaaaagcgggcattctgtttctccgcagcatgcaggaaagcctgtttgtttccaagcagaatattacggatgaagacgttcttttagaaattgccgaaaagacgaaattagatgttgaagaattcaagcgcgacctccattcgcaaagcgcggtaaaagcgcttcagtgcgatatgaaaatcgcggcggaaatggatgtcaccgtcaacccgacattgacgttctttaacagcctgcatgatgatgaagggctgaaggttcccggcaactattcttatgacgtgtacgaagagatcttattcgaaatgctcggggatgaaccgaagccttctgaaacgccgcctttggaatgtttcattgaatatttccggtttgtcgcatcgaaagaaatcgcactcgtttatgatttgagtctagaagaagttgaaaaagaaatgaaaaaactggcattcgcgaaaaaggtcgccagagtggaagcaaagcacggtctgttttggaagtctctttccggcacccaggaggatgtcacctgttgtgatcattaaaaaaagctgattccttacggagccggctttttttgtgcaaataaagaaaccgcgccgggataagcgcggtttcatatgtcttaacgacaacaaaggggatgggagaaatttttcacggtcaaacaaaggggtaatgtttgtttgtgatcaatttcacatccttatcatatcaaatcttgtcgagttttgacaagccataagattaatgttcatatttttgtcacaaaacataactgactgcttgttttcatagaatatatcaatgaaaaacaaggagggaaatcaatgctcctcaccgtattgatcatcggaatgattgtgtttttcttctttttaaatctgctggccatgatgcacatgctgccgatttacattacatctcccctgctgtttctgtccatattgtttgccttgtaccggctgaatcacagaaaaacgtttaaagggttttagaaaaagcctgcgcaacttatgcacaggcttttttgaattacgaagggttcactttcgaaagaagctcttccatttcgttcagtttctcttcaaacattttgcaggccgcctcgatcggttcaggcgatgtcatatcgactcccgcttttttcagtatgtcgatcggatattccgagcttcccgcttttaagaattcggtatagcgctccaccgcaggcttgccttcttttaagatctggctgctcagcgcttgggccgcactgtagcctgtcgcatattgatacacataataattgtaatagaaatgcggaattcttgaccattccagactgatttctttatcaatcaccatgttgtcaccgaaatactttttattcagatcataataaagttcgttcagcagttcaggcgttagcggctcgccttcctgcgctttcgtatgaatcagatgctcaaattcagcgaacatcgtctgtctgaacactgtgcctctgaatccttcaagcatgtggttgagcaggtacagacgctgtttttcatcctttaagctgttcagcatatattcaccgagcagcgcttcattagtcgttgaagcgacttcagcgacaaaaatgctgtagttaccgtacggatacggctgatattttctcgtatagtagctgtgcacggaatggccgaactcgtgaacgagcgtaaacagattattgacattatcatgccagttcatcaagatgtacggattcgtgccgtatgtaccggacgaataagcaccgctgcgttttcctttgttttcgtatacatcgacccagcggttttcaagtccttcttttaaaatagacgcgtattcctcgcccagcggagcaagtcctttgagcatataatctttcgcttcctcatatgtgaccttcattcccgaatcttttacaagcggtgtgtaaaggtcataaatatggacttcatcaaggccgagaacctttttccgcaggtcaatgtaacggtgtaataacggaagatgtttattgatcgttttaataaggttatcgtaaacttcttcagggatgctgttattggataaagccgcttcccgtgctgatttaaactttttcacacgggcgtaaaaattatcttttttcacagtgccgctgagtgtagtcgccatcgtgtttttatactgtccgtatgttttatatacggcttcaaatgcgtttttacggacttcacgattgctgctttccaggaaattaataaagttgccgtgtgtgatttgagtttccttgccgttttcatctttaatcgacggaaacgtaatatcggcgttatttaaaacgctgaatgtattggaaggcgacgacagcgcttctgaggcttccgcaagcagggcctcttcttgttcgctcagcacgtgcggacgctgttttgtaatttcttcaattgcatgggagtaaagcttaagctcctctttttccagaataaactggtgcagcttgtcctcctgaatcgccagaatttccggttcaatgtaagcagtcgcgctggcagcctgagaatacaggcttgcggctttatcgttcagcccttggtagaaagaatttcccgtatcctggtctgagcgcatatgcgcgtatgcataaagtttcccaaggcggttcgtcacttcatcctgtgccgtaagcgcagcgtataaattatcagccgaatgagcaagcgtgcctttaaaagaagataaattcggaattaattctttaactgcttgaaattctttattccaggcctcatcactaggaaaaatatcctctagtctccatgtatgctctgcctttacatcacttctgtcaggcagctgtgctgctttattttcctcagtcatggtgatccccctcgttttctttacttcaagccaattgaaaaaacgattgtttctccaaaaacttgtgttgtgattatcttccggcttttcactgccttttgtcaaatcatatgcggcatataagaccgagcataccaataatacagtgaaaaaacgaaaacaaaatgcttgtacgcccctcacattcgccaccaccttgacgttagggtgaacgaaatgaagcattctcattccccaaaaaagagcagatcccgccggcgcagctcttctgccgtttgagggagcttccgttgagatgagggcatatatacttcattctcaatttcccttaaaaaatcctgcaagcataagaaatcagcatattgttttaccgccattctgataaggctatcttgtgaaccataccgcatccggatctccttatgcctgattttttgccgtaaatcatgaaccatgccggataatcggatcggcgcgccttttttagaaagttccgcaagccgtaagtataaatggccctgccacacaaaaacaggacttgcaaacacaaagcccgctgaaacgggaataaacacttcagatgggagaaatggaaatgcaacctgatgtctttcgtaaaaaagacgccggataagatcggcatcttctgataaaaaccgcccgcttttgttgcggaagccggctacggcacgtccccacgagggaagtctgacgctgtgccgcccttccggatgacaaatgtctttcaggtttgctttgtgaagagggattgtggttaagccggcataagaatagccggtgtaaaatggagtgatggaatgcagcctgtaaaaggagcgggcgtcggggcagtaaaacagtaaggaggaaaatgaattgacttcaaagaactgccagtgaaaagcagaaagccggaaaaattgcgcggccatccgttttaaccgttttgccccgatgatccagaccggccggtacccggcgtttttcaggcctgccgtccggctctttaaagagtccgccgaaaggttcgcacattgaaattcaaaagccagcctctcgtctccgctttctgccgtcaagtcaggccgctgtcccgcggaagtcagatacggttccaggctgacactgcacccttgtgtctttagccagagaaaaagctgtctttttccttcaagatggtattcgctttcaggttcggattccccgggacacagcctgctttttttatgagcgaagtgcggcagtttctcccgtcccagtttgatatcaagctcacttttgcaaacggggcagaaccagcgtttctttctcagctccgccgctttttcctttgaatagcttccggccagctgaatgagccgtccatcggcagtcacagcactgaacatgttgcatcttctcctttcctgaatcttgttgtattcagcaggaagaagatataatcctgtttgcggatgagagccgttatacggttttcagccgttcatcctgtcattcagaacaaaaaaaaccgatttctgctgagagaaatcggtttgttatgatgcaaagtgtttctttattgtatataacgcatgatcagcgatcaccaatttgccgtattcttcaagacggtgaatgctgactgatgattcgtgcgcgtactccaacaggatgcttagctgattttcaacctcttcatcagtttgctcataaaaatctgcatataaataatatcggtcttcaaacgaatacagggtcgttttaattccgttaagattcaattttgatagcgagatgagatcctcaaaatcatcgaaccgcaaagtgaactgaagcttttgctccttatcttcccggctctcggcctgctcttctttctggaaatcatcaagtaaagcatcgagattttcatctgccggctcttgttttttatcttccgggatcggcagttcgagtttttgtccgtccttggaaagctgggcttttgttacgattatttccagtcctttgtccaatgcctgaacctgaatccaaagaggaccctcgacagcgaattcctcttcatcatgcacttcatccatgacttcccagaacagttcttcactgcgctcgcgattgtaccagatttcttctctgtcaaaaccgcgatcttcaatatcaccataagacatataaaattttacagtatgctcattaattctttctatttccattttgccaaccttcccttctttataagatgttgaagggacatctaagctcccgatgaatagtactttactacactttacccattccgtccacatcttaaccttatagaagacagcgcaaattctttatatttctattttatgataaaacagttataaaagaaataaaaaagcattttcacagcgaaaaacaggctttctcccggttcccatcataaatagcgcactgcttcatatattagctgtacaagcaatcgatctataagcgaggtgttaccatgccgcacgattacctgctgtcccttctgcttattatcgggattgaccttattctcggcggtgacaatgccgtcgtcatcgcgatggccagccggaatctggcccataaacaaagacagcaagcgatcatcttcggaacatttatcgcagtcatcttgagaatcgttctgacgagcgctgcggtctatttattgaatgttccttttttgcaatgcgcaggcggggtatttttattgtatctcggctatcagcttctgattgagaagaaagatgcgcagcatgtgaaaagcagttcttctctttggaaagccatccgcacaatcgttctggctgatatctttatgtcgcttgacaacgtcatcgcagtagccggcgcttctcacggtgagctgacacttgtagtgatcggtctcttcatctcggtgccgattatcatttggggcagcaagctcgttcatgccgccatggaaaaaatgcctttattgatgtatgccgggagcggtcttctcgcatttaccggcggtgaaatgattgccagagacagcaagctgtcatttttcatggctgaacacggcattatacaaatgatgctgccgattttgaccgtcgtatttgttatcctcgccagtatgatttaccagcagactgaaaaataaaaaaagcccaaaccgcgatggttttgggctttttccatgcttatcgtaagcttatatcagttggcaagacgctgtgcttctcttaattggaaagaacgcacttttcttggcaggaatcgtctgatttcatcttcgttatagccgacttgcagacgtttttcctcaatgatgatcggacggcggagcagtcccggatgctcattgattaaagtatataagtcttgaagcggcatagattcaacatttacgttcagtttctggaatactttagaacgggtagagataatttcatccgtaccgtcttcagtcatacgcagaatctgcttgatctcatcaattgataacggctcggagaaaatgtttctctctacaaacggaatctcgtgctcttcaagccaagctcttgcttttctgcatgacgtacagctaggtgatgtgtataatgtaaccattaatcttcactcctctaattagtaggatgaacatgtttgtattctcaaattgaaatgactttaaaaaaggaatctttataggtattatactataaaaaagtaagtgtgaacagtctcctgagaaaaaaatgtgtcaatccggcaaatttacggctggcggatgtttccccattctcaattagctcagctgatcgaaaatgttttttcgttttttctcatcaatgactttgagaacttcatccgttttttcgtatgattctccgtaccatttttcatctttataagtgtgaatgttttcatatgtctgtttcattgcttcaaacatttcttcttctgattccgtcttaggtgaccagtacagaatctccattttgttcacttcattcgtagccaatgaccggcgccgatacccgattgactgcgcatgcttgaaatgctctctttgataaaaacgcaagcgtttctgtgtatccgtgtcatcctcgtcaacaggctccacctcaagcagaatcggcttgtttttctttttcagcctgccgatcagcttgcttccgaggccttgtcctctggatttctttgacacaaacaggtaatcaataaagatgaaagagtcaaattccgcatacatcagcacgtggtactgcccctcttctttatgataaacatcgctttgctcctttaacagagcctccatatgcgattttgatttcatttcttcaatcggaaaatattcactcagcttttcgtaccagttcattcatttgctccttatgggttcgttgtcttcacacttttagatataccccatttccgattgtttaaacaatcttacatctattaagacgtgtgatcctttaacatggtttcaatttttttaaaatggtgtgtaatcgacgtttttggtataacggtttgccgcgtcccataataaaaattcgtcaattccttcatcatgcagcgctttaacctggtcttccacctggcgtttcccgtacttttgataatttccgctgccgagatatgatgccgtgaagtcctgaagccacggacgcgatacaggcgggtgtttcagcttagacagttttttattttccaccttcgcgtattctttgacgactttgtaaggctcaagatccggtttatcaatgccgaaatagcttgtccaatggctcggataaatcatggatgaaatgacatcgacctgttctgaaattttgctgaaattctggccgatcccaggcgcttccggcagcgtggctgaatagccgaaaatatcaaccgacacatccgcgccgtacggcttgagttttttcttcgcataaccgacaaaatcggtgacggcatgaacgcgtttttgcacattgctgtctgctgttttcccgtaatcgccgtgaccgtatgtcagttcgtcatcacgtttttcaaatccttcaggaaaacggacataatcaaactgaatttcttgaaaacccatctttacggcttgttttgcaatctttacattgtaatcccatacttctttcataaacggattgacgaacgattcgccgcggccgtttttccagacacttccgtttttttctttaaaggaccactccggctttttgttcgcgagttcgctgtctttaaatacgacaatacgcgcaatcggatagatctttttttcctccagctttttcatcatcttttttgggtctttgatgtacggcttggcgatttcggcatactcagaatggccgtccggcttaaaggtgaggtttccgttgtcatccttgacatcaatcaccattgtattgagttccgttttgtccacaaagtctgtcagctccccgaatttgcttcctcccgctgaatgccctgtgacgtaaatgccccgcaccttatcaggatgtgaaaaatgcagccctgacggataagcgaaccgtgcatttgatttcggcagttctttttcagccagcgctatttttacaagcggctgctcctctttcgcagcggcgtgggccggataagcggctgcactgataaacagtcccgcacaaatggcgcacaaaatggttttcatactgatctccccctttttttccattatagaaaaacgggagcaggcttaataaacttgaatgtgcgcaaaaaaatcctccaagactgagtcttggaggatgatacttttatagataggttttaaattcagcttctgtgcacatgacaaaatgtcccggtttcacttctctgaattccattttttctccttcctggagctgatgaactgccggatcgtatttctttcgcatgcgatttctttcatagtccggatcaggaagcgggatagcggacagcaatgatttcgtatatggatgaagcgggttttcgtaaagctcatccgccggcgcaagctccaccaattttccgaaatacatgacgccgatgcggtcgctgatgtatttgaccattgataaatcatgggcgataaacaggtaagtgagccctttttctttctgcaattctttcattaaattgacgacttgcgcctgaatggagacatcaagcgccgaaatcggttcgtccgcgatgataaactccggatcaaccgccagcgctctggcgattccgatacgctggcgctgtccgcccgaaaattcatgcgggtagcggttggcgtgctctttatttaaaccgaccgtttccagcagttcgtgaacccgctgcatccgctcttttttcgtttttgccaggcggtgaatatctattccctcggcaataatgtcggcgactgtcattctcggatttaaagatgcgtacggatcctggaaaatcatctgcattttccggttaaattccagcagcttcttgcgggattttttcccgtggacattttccccgttaaagagaacttccccgccggttgcctcatacagccggataatactgcggcccgtcgttgatttaccgcagcccgattctccgacaaggccgagcgtttcgcctttataaatatcaaatgacaaatcatctacggcttttaccgttcctttctgcgtgaaaaaatgctgttttaaatgtttgatttcgagaagtttctcagtcatttttttcaccttccttcattaaaacaggatgctgatacgtattcggaagctgacggattttagccttcaccgcttcagggggctcgaccttaggcgcatcaggatgcagaagccacgatttcacaaaatgcgtatcagacactttatacatcggcggttcctgttcaaagtcaattttcatcgcatatgagctgcggagcgcaaatgcatcccctttcggaggattcgtcagatcaggcggcgtgcccgggatggccgtcagtttttcctgatcggtgctgtccaggctaggcattgaggcaagcagcccccacgtatacggatggcgcggatcataaaagatttcatccaccgtgcccgattcgacgacctgacctgcgtacatgacggcgacccggtcggcgacattggcgacaacgccaagatcatgcgtgataaaaatgatagacgtatcaattttcttttgcagatctttcatcagctcaaggatctgtgcctgaatcgtcacatcaagcgctgttgtcggttcatcggcaattaacagtttcggatttgccgcaagcgccatcgcgatgacgacacgctgtctcatcccgcctgaaaattcatgggggaattggccgatccgtttttcgggcatcggaatcccgacgagatcaagcagctctatggcgcgctttttcgccgcttcacttgagattttttcatgtttgaaaagcacttccgtaatttgtttgccgactctcatcgtcgggttcagagaggtcatcgggtcttggaaaatcattccgatgtcctttcctctgatggcctgcatttctttttcagacatcggcacgatatcgcgtccgtcaaaaagaatctgtcctcttttaaagtagcccggcggcatcggaatcagcttcataatcgcttgggaggtcacactttttccggaacccgactcccccacgatcgccagcgtctctcctttattcaaatggaaattcacgccgcggattgcctgtacctctccgccgtatgttttaaatgaaatggctaagtcttttacttctagcaaacgtgtcactcatatcactccttatttgcgtaacttaggatccagcgcgtctcttaacccgtcgccgacaacgttaaagccgaacatcgccaggcagataaagccggcagggaagaacagacgccaagggtaataggttaatgcaggcaatccgtctgaggccatcgttccccagctcgcaagcggcgcaggtacgccgaggcccaaataacttaaaaacgcttctgtaaaaatcgccgtcggaaccgtcagtgtcatcgttacgaggatagagcccatcgcgttcgggacgatatgcttaaacaaaagccggccggttttggcgccgagtgtctgtgaagcaagcacatactcctgattctttaattgcagcacctgtccgcggacgattctcgccatattgatccagcccgtgattgtcatggcgacgataatggtgagcaatcctttcggcaggacaaccatcagcaaaataaccattaataatgaaggaacagcccacagaatgtcggcgatgcgcatcatcacttcatctgtgcgtccgccgcggaatccggaaatgctgccccagattacgccgattaataaatcaagcacggcagctgcgactccgataaagatggaaatccgcgcgcccacccatgtccggacgaatatatcccttccaaggtcatcggtgccgaaccaatgatctttcgacggtgctttatccgcatttaatagattggtagtggcataatcataccttgaaaagaaaggcgctaaaatcgccatcagaataataagaacgatcagtacgagcccgaccatcgcaagcttattgctgcggaagcggagcatggcgtctttccagagggaaaggctttttttatttattttttcggcatcgccggcattagctgaagctggttcaaacatatttttaggaatgttctgcatggtctaggctcctttctttgctttggaaagcttgattctcggatcgattaatccgtacagcacgtctacaattaatacgcataaaagcaggagcacgctgaagaacacggtaactcccataatgaccgtataatcacggtttgtaatgctgtttacaaaatgcgcgcctaaaccgggaattccgaaaatggattcaatgatgaaacttcccgttaaaatggatgccgccatcggccccatatatgtcacgaccggcaaaagcgcgtttcgcagcgcatggcgcacggtgactgacggacgggaaagtcctttagcttttgcagtccgtatgtaatcgctgtttaacacttcaatcatgcttgaacgggagagtctggcaatgaacgccatcggcatggaagcgagcgcaatagagggcagaaaggtgtatgcccaggattcccaccctgcgaccgggaacagttctaatttaattgagaaaatatattgcaaaatcgtcgccaatataaagctcggaactgagatcccaaagatcgttaaaatcgcaatggtataatcctgccatttattatggtacagggcagcaagcaccccgaaaagcacaccgaacgctaaagcgaggagaatagcttctgcaccgagagtgaatgagacggggaagcctgaattgattaaatcattaacactttggcctttatatttaaaagaaggtccgaagtcccacatcgccacagattttaagtagctggcatattgaacgaaaagaggcttgtccaggccatagtgttcgtttaagtttgcctcaatttcaggcggcagctttctttcgccggaaaatggtccgcccggcgctgcctgcattaagaagaatgtggcggtcacaatcacaaacaatgtgatgatcatgtaaatgaatcgtttaccgatatatttcagcaaggtgaacacctccatgttttttacaattttatacttaatcagtaagaaaggtatatggggacatcctccccatataccttgggccttttgttttcagaaccgtcttttattcaaaagaagcgtttctgaagtaaacttcgcctgttcctgtcaagatcacatttttgaggtttttatcctgcacccaaggatccgtatagaaataaactggggcgaccggcattgcgtcaataaagatcttttctgcttttttcagctcttcgatacgtttatccggatccgtttcaagctgagattggttcagcagctttttaaactcaggatcttcccatccggtatcattgtttccgccttctttatcacggaacaattcaaggaagttgatcggatcgttgaaatcgccgagccagcccatacgcgcgatttggtagttctggctgtgcagcttgtcgatgtaaacattccattcggagttatcaagctcaactttgacgcccaagttctttttccacatttcctgtacggcctgcgcgattttcgcatgcgcgtcatctgtattaaaggacagtttgatcgccggaaggtcagaggcattcttaacgcctaattccttcagtcctttatttaagaattctttagctgatttgacgtcattgtctttgaaataaccttttgtgttatccttgaatcccttcattgacggcggcaccgcagccatagccgggatttgttcgccctgcgttacatttttcacgatggacgagcggtcgatcgcataagcaagggctttacggatgttgacattgttcagcggtttctcttctgtgttgaatttgtaccaatacacgcctgcgatcggttcaacgtgaagagatccgtcttttttcaatgtcggcagagattcagtcggaagctggccgagcggcattcctgcccagtcaagctcaccggcctggaattttttcagttcggtgttgttattgttaatcatcaccatgttgattttcttcaatttcacagcgtctttatcccaatattgatcgttcttttcgagcgtgatggaaccgctgtgtttccaggccgtcattttgaatgggccgtttgacacataattctcgcccgcgtttgtgttccagtttttatgtttttccgcaattttcttgttgaccggcatatacgtatagaatgaagttaattgggtgaaataaggtgtcgggttattcagttcaacctttaatgttttgtcatttacggcttttacgcctacatcatcaatcttgccttttcctgtattggcagcttcagcgcctttgatgtagtagagctgataagcgtattgtgattcgttgttcgggtcaagcgcccatttccacgcgtattcaaaatcctgcgccgtcacagggtcgccgttagaccatttcgcaccgtcacgaatcgtaaatgtataggtctttccgtctttgcttgtttcaattttagatgccattccttcttcaggctcacctttggagtttacgcgtgtcaatccttcaaaagtctgtcggattacgcctcctgaaacggaatcattcgctaaacccggatgcagtgagaacggctcggttttaatattgatattaagtgaagtctgtcctttggtgtcgcctgatccgccgctgaatccgccgcacgcacttaatacaagcgaaaagataagcatcaaacctacaatagaccaacgctttttcatgcactaaccccctaatcaaatttttcagcctttactactaaatactcagaaatatcagacaaaataacttaatatttttctaaactttaattgtgttccgtcttttctgattattttatgtaaagaagctgtaacaatagagtgaacaagttcattataatgaaatgaataatttattgcaatactattttctcaatttaaaatatttaaatttggtcagtttttctgtcaaaaaggtgatacacttctatagtttaaagcatgacctaactaaatttttttattgcaatttccagttcatattgctttttacatataatattcgttatacgaaatgttgatatacgttatcatttaagcattttcagttctttttgaggatttccatcccttaagcaaactggaaataagcttgtattcctctgatgacatttggctataattgatttataatagatcaatcaaatacatttgttgtgattgcgatgatgaagaatagtacacattttcatccgtttgaagagagtctgcggtgctgggagcaggtaacgggcaatgtggaatggacttctgagcagctgaccgaacgttagtaggcccagccggagcagcctccgttaccaacgtctcgagcgattccattgtaatggaataatcagggtggcaccacggttcattcgtcccttttttctacgggaagaatgggctttttttattatgttttaagaaatgaggtaagaactatgaagaaaacgattttttcaggcattcagccgagcggttccgttaccctcggcaactacatcggcgcaatgaaacaatttgtcgatttgcagcatgactacaacggctacttctgcattgtcgatcagcatgcgattacggttccgcaggatcggcttgaactgcggaagaacatccgcaatctcgcggctctttacgtggccgtcggacttgatcctgagaaagcgaccctctttatccagtcggaggttcccgctcatgcccaggcggggtggatgctccaatgcgtcgcatatatcggcgagcttgagcggatgacgcaatttaaggataagtcaaagggcaaagaagccgtcgtttcaggcctgttaacctatccgccgctgatggccggcgatattttactgtacggaacggatcttgttccggtcggagaagaccaaaaacagcatcttgaactgacccgcaacctggcggaacgctttaataaaaaatacaatgacatcttcacgattcctgaggtgaaaattcctgaatcaggcgcgcgcatcatgtcactggctgatcctctcaaaaaaatgagcaaatcagatgcgaaccaaaaggcatttatcacgctgcttgatgagccgaagcagctcgagaagaaaatcaagagcgccgtgactgattctgaaggcattgtaaagtatgataaagaaaacaaaccgggcgtttctaatcttttgacgatctattctattttaggaaacacatcaattgaagaattagaagctgaatatgagggcaaagggtacggtgaattcaaaagcgatttagccgaagtcgttatcggcgcattgacaccgatccaagagcgctaccgtgaattaattgagagcgacgagcttgaccgcattctcgacgaaggagcggcgcgcgcaaacaaaacggccggcaaaatggtgaagaaaatggaaaacgccatgggtctcggacggaaaagaagataaagaaaagaggcggggattctcccgcctctttttttagttcacttttgattcctgctccatttcccaaagcttttcgaaaaacggctgccctttaatcaaattttcacagaacgcaagatgtttatctgaccagccttcaattgtttcattgtaaagcatgtcccagatctcttcaaagctcatccgtttgatctgctcatacatatgcggattccattccgtgtaccaatacacaatttccgcacggtttttcagccctttcagctggtcgagcgccataaacatcagctgcttgatctgccgctcttttctcgtcagccctctgacgtgctccggcgccaatgacaaaatgtgatattcctttgaagactccaattgcgccggctcaaattgaaacgattccggttctacatcctttaccatttcataaacaagctgctcctgtctcggaatcaggcggctctttctgaccggaatggtatatccgatcgtatccacggcaatgatgccgatcccgtctgtcacgacaaaacagtactccagctttgtccgctcatgattttttcgcacgtatgacttttgatggacttggtctagcagctctttcggaagctctgataagtcgttttctatgtaatgaaataataccgacggcactctgagcagcggcgtctgatccaaaagctcaaccgtgtcttccttccgccattcgtgaaaatggcacacattgtagccgttttcttccccttcaaaccaattgacccatacatcatgaagaaataacatattcgacccctcactttataaaaactgttgtccacagtataggcaagggatagataaattattccatttcaatatgagatttccgcattacggaactggatttccgactgcattgcaacaaaaaaatctcccgttccgtccgggagatcatttcacatttttcggatcaagcgcatcacgcagcccgtcaccgacaaagttaaagcacaatacagtaagaaggatgaacaatcccggaaataacgggtaccaccaagcctgaatcataatcgtaaagttctgtgcatcctgaagcatattgccccagcttgcgatcggcggctgaatcccgaaaccgagataacttagcgccgattcggccagaataaccgatccgacttttaaagtggctgacacaataatcggtcccagcgcattgggcaggatatgtgaaaaaataattttatgtgtttttgttccgattgttttagcggctaatacatattctctcgatcgcagggataaaaattctcccctgaccaaacgcgcggttgtcgtccagcctgtcagacagaaaattaaaattaatttatccacgcctggcttaaagattgtaacaagcgtaatcaataagaaaatatcaggaatggaaagaactatatccaccaaccgcataataacagcatctgcgaaacctttaaaataacccgctatcgctcctaaaatcgtcccgataaaaatagagccgacaacagaggcaaatccgactagtaaagagattcgcgcgccgtatagaacacggctgaagatgtcacgcccgaatttatccgttcccatcaaatgttcaagacccggcgctttaaatttatcaagcaggctttgctgctcttgagaataaggagcaatcaccggtgcaaaaatcgctgacataataatcacgaacagaataacagcacctgcaaccgccagtttatttttcgaaaacttttcccaaaagatttttgtcatggtttccggtttctcagcaatattttctttcagcccgatctccggtgacggagatgtgttcagctcagccatcgatgtccccccttttaatattcaattctcggatcaaccactgcgtataaaatatcagcgacaaggttgccaatgaccacaagaacagctgaaatgacggtcatcgccataatgacgggataatcacgctgaaacgctgaatcaacaaacagctttcctaaccccggccatgtgaaaatttgttcgacaacgacagatcctccgataaacgagggaatcatcaaaccgaaaattgtaatgacgggtaataatgcatttctcaatccatgtttaaataatacacggttttccttgaaccctttcgctctcgctgtacggatataatcctgatttaatacatcaagcatattggatctcgtatatctcgtcagtccggccatgtcagctgtagctaatacgaatgcaggcagaattaaatgatgaatccggtcaaatatattgaaatcggcattcagcgtctcgacaccgccggtcggaaaccagccgagatttactgataaaatcataatcaaaattaatccaaaccaaaagtttggaatggccagacctataaatgaggtaaacgtaatgccatagtcgagctttgaataaggccgctttgccgacaggacaccaaacggaatagaaatcataagagccaaaatcgttgaaacgagcatcagcagcagcgtattgggcattcgggccataatcaattctgaaacaggcgttccttttctgacaatagacgttccgaaatcgccctgcaccatgttgccgagccactttaaatattgaacgtactgaggatcattcaaaccgtatttttcaataaactgctctctgtcagcctggctgattttcgggtccatcattaatgtcatcggatctccgggcgcggctttcataataacaaatgataaaattgtaattcccaataaaatcgggatagacattaaggttcttctgataatatatgcagccatatacttgtccccctttactttccttattaaaaacagaagagggagaaaacgctctccctcccctttaagggaaaattattttgcaagccaccatttttcgatattatacaattcacgtttcggatgatatttgaatccttcaagattttgcggcattgccatatgattgttagggtaatacaagaacgtatacggctgatcttccgcaattttttgatagatctgctcatattcttttgaatattgctttctgtcactgattgattttgcatctttcatgagcttatccgcttcggcatttttataccaaacgtagtttaagccctttttaatctggcttgaatggaagatgtcatattgatctgggaatgtggataaactccatcccatgaccattgcatcaaaatcccaattcggagggttcatttgttcaacgagagcgctccattcaacgatttgggtcttcacttcaatgccgatttttttcagctgttcctggacgacgacagcgatgtcttcacggactttgtttccttggttcgttttaagggtaaacgagaatttctttccgtctttatccaggatgccgtcaccgtttgtatctttccagccggcttctgcaagcatctgtttcgcttttttctcgttgtacgcaaatttcggaacttctatatctttaggatagttccaagataaaggggattccggaatgtaggctaccttgccgtctccgtctaatacttggctgacgattgactcgcggtcaagagcggttgtcagcgcctgacggacctttttatctttaaataattcatttttttcattccacccgatgtacacgtaacttaatgccaaatcagtaacgactttcagattattaaatttttcagccgttttgtagtcagtcgcgggcacattaaagaaattaatatcgcctgcctgcagctgagcaacggcagcatttgcgtcgggaatgactttatacgttacagtatctaaatacggtcttcctgcaaaataatcattattcgcttcgagtttaatatattggccctgcttccattctttaaacttaaatggtcctgaaccgatcggtttctttctgttaaactcattttcttctaaatcagcaatcggaacattaccgagaatgtgcttcggcagaatggctgtgctgtctaacgcattattgtaaaaattaccgtctttatatttcagcttgaacaatacttcgtaatcgccttttttctctacggatttcagcatttcatatgttgatccgcgttctcccttgtaatctttgcttaaagggacactgtacgtaaatacgacgtcatctgcagtcagttctttcccgtcatgaaacttaacgcctttcttgattttcacatcatatgcaaggccgccgtctaattctttaatgctttcagcgagtgataatttcacgttcagtttttcatccgttttcgttaaaaagctgtacagcatattttcaatatccgtacttgcgtcatccgtagaatacagagagttaaaaagtgtgggttccccgattgacccgacaaccaaatctccgcctttttgcggttttcctgccggtttggattcggtgcttgtggattttgagccggagcaggcggacaggaagatggcgagcgccataaaaacacttagcatcatcagtgcgcttttacgtaatttcatatcaattccccctttgtgatatatatgcagcaaactggttatgtaatccggcataccccctctcgatgcttgtcatttcaggcatataaatggcaggcgacgtaatggccgggagcggcttcttcaaatgccgggatttgttccttgcagatcggtttggccatcgggcaccgcgtgtggaacacgcagcctttcggcgggtttgccgggcttggcagttctcctttcaggatgattcgttcccgcttgacggcgtctttttttctcgtgacgggcactgaagacaaaagcgcttgcgtataagggtgaagcggattgccgtacagctcgtgtttatcggtcagctccatcatttttcccagatacatgacgccgactctgtcgctgatatggcggacaacactcaaatcatgagaaataaacaaataggtcaggttgaattcttcctgcagttcttccatcagattgatgacctgggcctgaatggagacatcgagtgcggaaacgggttcatccgcaataatcagctcgggattcaatgtcagagcccgcgcaatcccgatccgctggcgctgccccccggaaaattcgtgcggatagcggtttgcaaagctcggatgaaggccgactttcgccagcagctcctccactcgctcgttccgctcgctcatgctgtacatatggtgagtctggaacggctctttaatgatggaacgcagcgttttcctcgggttaagggatgcgaagggatcttggaagaccatctggatgtttttgcggacgctttttctcagcttttcttcagataagccggagatatcctgacccttaaaaagaatccggccgtctgtcggcttgtataaacggatcatcgtccttcccgccgttgatttgccgcaccctgattccccgacgatgccgagcgtctccccgcgcttcagtgaaaaagaaacgccgtcaacagcctttatatctccgactttcctttgaaaaaaaccggagcggatcgggaaatatttttttacgtctttcagctctaaaatcgtttcttggcctgcagctgtcattttgattgggcaccctcttcctcatataaaaaacaccttacagaacggccgctttcatgcgttatcagctccggctgccctgttttgcatttgtccatcgcttttgaacacctcggggcgaatcggcagccttccggaagattatccggtgtcgggacactgcctttgatcgcttttaatgtatcaatctctccatctatcaccggtatggagtttaacagcccttcggtatacggatgaagagggtttaaaaataagtcctccacactcgcgctctctacgacttgtccgcagtacatcacgatcaccctgtcggcggcctcggaaacgacacctaaatcgtgagtgatcagcagaatagaagtatcgaattttttgcagaggtctttcatcagctccaatacttgggcttgtatcgtcacatcaagcgccgtcgtcggctcatcagcgatcagaagcttcggattgcagctgagcgcgatggcgatcatcaccctctgcctcatccctccggaaagacggtgcggatattctttcatcacttgttccgctctggagaatccgacgagttccagaagctcaacggcttttttagccgcttctcttttattcatttttttatggtattcaagcacttcggtaatttgttcgccgatggtcagcaccggattcagggaagtcatgggctcctgaaagatcatagagacgtcatttccgcggattttgcaatattcgttttcggtgaaggaggccaggtccctgccttcaagcttaatcgagccgtccataatttttccgcccgagccttggacaagtcccataatagaaagcgaggtgatgcttttgcccgagccggattctcctacaagagcgacggtttcgcctttgttaatgtgaaaatcaaccccgtcgactgcggggatcggctgtttctttctgaaaaaataggtctttaaattattcacttctaatagtgtgctcatgatacgcccctttctcattccgctgaagcagagggaaacatacgtttcgctatcacaaaatatagaatagtcgaaaaattttatagttgtatattattacatcattattacaaaagcaagaattttttaggataaatgtaatatccttaaataatttccattcttttaatctattaatgcgttgcctccagaaaggtttttgaagggatggccaatgcttcttttactgttttttgatggtcggttaaatatttttttactatattgaatccgacagcatagccgagcattgaggggaagtatccttttccgtataacagctgggaaaacattctgctgtctctcgttaagcggaggttcggcttgactcttttttcaaacagaaaatcaagctgctcaggcgtatagtatgacgtccattccgccgtaagacttgagccgaaccgctcatacacagcatattctgccagcccctccatcatgattgtatcaagaaatgtctcatctttttcgtcctttgtcacatgttctaaccggcagacgtgattatattcatgtgtcataagggcggatacagctgaattggaactatccgacgatagaaagaggaacattttgtcccgaaaggccagaccggattttgatccgaattcctgacggattttccggtttcgttcatcgacgggcaaaactacgatcggcacgtccggcccgttccacttctcctttaaataggcttcctccttttgaatatggctgtagcatcctttttctttcagccgtttactggtcctaacgccgtccttcagatggcggaacatgccgtggttttgcagcatcccgagtatcggcttccactctttcttatcggcccctgaaaaaagcggcaaaagatgcggggccagatcatttacggatgccgccttttccatccattgatatgtctgcttgacgctcataccggttcgcctcctcttgttgttatcatatgcacgcacaaaaaaaccggccacctttttcaggcagccggtcaaaactgtattattgatattttttaaagatcaaagtggcattatgtccgccgaagccgagcgagttgctgagaacgacgttgacatcctgctcgcgcgctttgtccggtacataatctaaatcacactcttcatcaggtgtttcgatgttaatcgtcggcgggataatgccgtctttaatggccatgacggagaagattgcttcaattcctccggcagcgcctaacaaatgacccgtcattgattttgtcgaactgacggcaagcttgtacgcatgatcaccgaaaacggtcttaatggcttttgtctcgtatttatcattgtagtacgtgcttgtgccgtgagcgttgatgtaatcaatttcttcaggcttgatgcccgcatctttgattgcttcctgcatcgctctcgcaccgccttccccgtcttgggcaggcgcggtaatgtggtaggcgtcacccgttgagccgtagccgacaatttccccgtagattttcgcaccgcgggcaagggcatgctcaagctcttcaagcacgatgatccccgcgccttctcccatgacaaagccgtcacggtttttatcaaacgggcggcttgccgttttcggatcaggatttgtagaaagggctttgtttgcgctgaagcccgcaaatgacattcttgtcagcggcgcttctgttccgcccgtaatcatcgcatcggcatcgccgcgctgaatgactttaaacgcgtcaccgatagagttcgttcccgtcgcacatgccgtcaccgtacaggagttgactccttttgctccgagagcgattgagatttggcctgtcgccatatcaggaatcatcatcggaacaaagaacgggctgacccttctcggcccttttgtcaggaagatttcgaattgggattcaagcgtttcaagaccgccgattccggacccgacccaaacgccgactctcgacgcgatctcgtctgtgatgttaagaccggcatcttgaacggccattttcgcggctacgacagcgtattgcgtgaagcggtccatttttcgcgcttcttttttatccatgtgattttcaatattgaaatctttcagttcagcagctactttcgccggatactcgtccgattccacacgtgtgatcggtccgattccggatacgccgccgattgcatttttccagcttgtttcggcgtcgtttccaagcggagacagggctccaagccctgtaacgactactctttttttactcatcttgtgtgcacctcacttttttttatcgtccccagcgtattgctatggcgccccatgtcaatcctccgccgaaaccgaccatgacgatgacgtcgccgtctttaattttgcctgcttccagttcctctactaatgaaatcggaatggatgctgcggatgtgtttccatatttatggactgttttagacatcttttcaaccggaagctccaaacgttcccgtgccgcttccatgatgcggatgtttgcctgatgcggaatcaaaaagtctacgtcctctttggagaggccggctttttcaatgacatttacactcgattcacccatttgccggacggcgaatttgaatacttctcttccatgcatgattgtatgccctttttcatctaagtacaagtgctggccgcctgtaccgtctgctccgagctcaaatgacagtatgcctctgtcgtcgctgaccggtccgatgaccgccgctccggctccgtctccgaacagcacagccgtattgcggtcgtcccagtcggtaatgcttgagagcttttccacgccgaccacgaggacatgtttgtatgtttgcgattcaatgaattgtttggcggttacgataccgtacataaaacccgcacacgcggcgctgatatccatcgcgcacgcttttttggccccgagcttctcttgtatcatacaggaaacggtcgggaaagactggtcaggagtaaccgtcgccacgaggatcatatcaagctcctcagcggaaatgccggcctgatcaagcgctttttgcgcagcctcagcggccatgccggatgaatacatatcttccgcggcgattcttctttcttctatacctgttctcgtacgaatccactcgtccgatgtatctaccatttgttcaagatcatgatttgtcagcactttttccgggatgtaacggccgacgccaagaattccagctttcattggaaaagactccttttttataatgaatttaaaactaattagttatgatcaattattagtatcaggtactaattctaccctattttttttctgttggcaatatattcgtctaaactatcggacgctgctcctcatagaataaaaggaagacgaaaggaggcttcactatggatattttctccaaaatgatgttcggcgattccagagaccgggataaagaaacggaagaaacccctgagcagcctcaggctgaaaacgaagaagagatcgattacaaccacgtgatgaatcagctggggtccatcatgaactctctggatcaattaaagcccgtatttaaagacttcgcgccgatggtgtccgctataaagaaaaaaatcatgtgaaaagccacttcatgaaaagtggctctctttatttattcagctccccggcatcagatctgccaagctcatacgcttccgccatgaccgatgtaaacaggtccataaacggctgaatcatttccatagacagatctatgccggatttctcaagctccgcctttgcttccggcaggtatttcattgcgatctgcataaattcaagagacttttcatgctgcatgtgtatccacctctattcatttgacggcagttcatttgttcggttatacgtttttacaaggtctgagattttgtcttgaaatgctttgtccaccagagggctgaacgtccccatttcaacgactccttccctgaaatcaaagttgtgatctccgctcttgagcgtacctttattatattgctcggcaattaatgtataggctttatctacgttttgcaccgtgcttgtcagcaccgtgtttttgccgagattcgattgctcggcgacatagccgatggcgtaaagcccgtcttttttgatttgctgaatgacaggaacattatacccgtctccggccggatatacaacatccgtgccttccgcttttaacttttcgtaaagatgcagcgcttcattgccgttatcccagtggtccgtaaattcagtattgacggtgatatcaggcttttcatatttcgcccctttgataaagccgtctacttcaggctgccacaaaaaggaggcgatgacgccgacctcattggtttttgacatatgggcggccgtcattcccccgaaaaagcccattgcttctcccataaggtgaacgcttgtgacattgtcgcttttcgccgttccgtttgcgacgacgaattccatgtcgggataatccttgctgatcatattgaagatttcctcgtattcatttccgtgcccgtataaaagattgactccttttttatgaaaatcatctatcgcttttaaaatatcttcatcggatctgatattttctttataataaacgtcaacgttaaattcagattgtatcgctaataaacctttgtaaccttttgtgccccataccaagtcactgatggtatcgggaaaaagcattccgaccttctcaatttttcctttaaacggagtttgtgcgcatccgctcaataaaaggaggagagaaaagatcatgacaagcctggtgatcaagccatgttcaaccccttttcaaactcataacatatataattgatatacgtttattgtagcggtaatgcacataacatggaaggtatttcttaaaaaatgtcgaatattgatgaaaattgtcttttccattctttaattttttcttccgcttccgttttttgcgttttttcttttatttccagggtaataatctgattttcgtcttctgtgccgtcagcctcaagctgattcatcagcccgcagactgcgtcttctaaaaagatcctgctctcgccatcttcttttgcttccgtccacggaccgtaaaggggaggaaggataatcgcttttgccgtatcccgctgaccgtttttttcccagtctccgtgatcctcactgtaaacaatccaatataaaggctcagccctttcttcaggcagacacccgctcccgtattgaacgcagatacgatcgtattccttttcaccgatttcatctattatttgaaaaagcccgtttctcgcgagccacattaaacgttcttctaaatacagctgcctctttttgtcctccggttctgccaaaatgacatcgacatgcacaccctcatccatcaaccgttcgcacaatgaaaggccgagaaattcatctgctccaatgatcagcgctgtcttcatcacatctgccgcctttccggtttttcattcgcacacaagccaaacagccctctgaaaagagatggctgttgtattctattcattacaggtctttttcatgactgcggaaaaaccggcagatggctctgtacatgcgcgcagggttctcaagcaggtgatacgtgatatcagtcttgcttccggtcttttcccgggcttctttatacgcgttcgcatgcagggtgtacgggtacggcgctccggtcgttctttgccatatatgtaccggcacgcgggtgcggcagccggtaatggtctgatagctcagtgagcttgcctctttttcagaaacaccgaagctttgtgccgtttccctcaggaactgcttataaaaaaacttattttctttctctgattcaaaatgggcttgaagatcaagacaaggatctaacattgcggctgaacggatatgctccggtgaagactgcagcaattgatcggcgataagggcgcccatgccttctgcgagcaagtgtattttcggattgagggtttcttgtttcagcacataatgcatcagctgtctggcgtaaaggacggctttttccgaaccccaatgccgtccgtataaattgctgttaaaaatggtgtaccctctgtcaagcagcacatgtaacagctgctttctcccttcatgttcgagccaaaagcttgagtcccggctgacaaagtgggttctgtcccccagaataaagatacagaagccgttcggccgatacggcagatggatgacgttcggctcagatccgaattggaaaaatctttccgtaatccccatgcctgcccgcctccttttactcctaatctctctattggctatcatatgtagaagaatgaaaacggatcggataaactcctatttgctgctatgttttggctattatcccaagcacaggaaccgaattttccttcagacggccggacaggcgggcacatgtcagtttcaggcgcgcttttgatgagaaaatgaccttccgcccgcgccttatgtatggtatgatacaacgtagaataaaatgaaggacgaggtggaaacgtgcggttagttatcggttttatttggacgttccttttaacacatatggcctgttatttgatcgcctccatgaacagcgcggcgtacaacttcaaacaatcttccgttatcgccgtggttattgcggtgctagtctttgttcttgcggagatcatgcctgtcaaacaggatgcaaaccagcattaaataaaaaaacctgctattcagcaggtttttttgtgttcacggttttcgttgatacgtccacaatctgttgtggtttgaagtttcagggaacatttctcccactgtgagcttgattttctgcggatttttgaccatgcttcccgtttcgccgatttcaacgtacacaccgttattcggcgctttttgtcccgggcggaattgatgctgctgtcccacgtcatttcctcctttttcttttttatgtagtatgcgcttgtatgcggagaaatatcaaaaaccgctgaatgagattcagcggtttttttgttcatcctgtttgtaaagaagagctttcaggagcgctttttgcgcgtgaagccggttttccgcctgctggaataccgcagagttcgggccgtcgataatctcagacgtgacctcttcctcccgatgcgcgggcaggcaatgcaaaaatgtatagtcgggtttggcgagactgacgagtgaggcgttgacttgatacggggcaaacacattcagccgctgctgcgtctcttcctcctgccccatgctcgtgaagacgtcggagtaaatcacgtctgcatcccgcaccgcttcctgcggattttcggtaagggtgattttcgctccggaaacagccgccgcttctttcgcggcattcaccgcctcttcctctgcttcatagcctttcggcgaagcaaccgcaatgtcacagcccatttttgcgcagccgatcataagtgaatgcgccacattatttccgtcaccgatataggcaacctttactcctttcagttctccttttatttcttgtatcgttaacagatccgcgagtgcctgacatgggtgataccggtctgtcagcccgtttatgacgggaatgtctgcatgctcggcaagctcttcgactttttcatgttcaaaggtgcggatcataatggcatcaacgaatccggacagcaccttcgccgtatccgcgaccgtctccccccgcccaagctgcaggtcgctgcttgaaagaaatagtcccgttcccccgagctgggccattcccgcttcaaaagacacgcgtgtgcgggttgaagatttttcaaaaatcatcgccaatgttttcccttggaaaatcggctgtatcggatgttgttttaataatgaagcttctgtcagaagcgcattgatgtctgacgggctgacatcttttaaggaaagaaaatctttgccgtacaaatgggttaatgtgtgttccgcttttattgtgtgcatgatgccacttccttttgataaagatctttgagcgatacaggctgaggtttgccggagccgcttgctaaaaatgcctttacggtttccggttcagtaaagaccgtcacaccgtgcgtcatggcttcgatccgttgtttacgcgcttcttcagagtgattgaaattgatatggaccgctttatcctttcgctctgcccatgccgggaacgcatctttgcatacggtaaatcccgcctcttgagcctgacgttccaattccgcatcacagccttccagatagatgctgccttttttctcccagacgtgcgcgtagatttttttcagggcgctttctgcgtcaaacgcgacacacatgccttctccggtcgacttcatttccggcccgggctttacgtccacatcctgaatggcgtgcgaagaaaaaaccgggaatttcactgccgttccgtgctgattttgaacctcgggcttgatgtctttaagggaagcgccggccagcaatttggcggcaagcgggatcatcggcacccccatcaccttagacacgacaggaactgtgcggcttgcccgcgggttcacttcaagaacgagaatatcccctttgtcatcaatgacaaactgaatgttcatgatgcctttaaaagccagttttaccgcgattttttcggcggcctcttttatattccgctgcatatcaggtgtgacagacggacccggaagaatcgcaaaactgtcgcccgaatggacgccggcgcgctcaatgtgctctgtgtaagtcggcacgaatacttcatgtccgtcggaaatcagatcgatctccaattcttttcctgtaatgtactgatcgatcaaaatcggatacggcatgcctgcttcattttccagcagttctgacatttgcgcttctgaatcaacgatgatcatgcccatcccaccgatgacataagacggacggatcagcacggggtagccgattcggcttgctttttccgttgcttcttcttttgaataagcggtttcgcctttggcatgtttcaggtcaaggtcatcaagcagctgataaaacagatcccgatcctccagcgcatcaaggatttcaaaggatgttccgagcagcggaatgcccgctttttccagcggttcagcggcattgatcgcggtctgtcccccaaactggacgatggcaaaatcaatgttttcatattccgccacgtttaaaatatgttctgtcgtcagcggttcaaaataaagccggtcggcgatttcataatccgtgcttactgtttccggattgttattgatcataatcgtttcaaaacccagcttttgcagggtcagaacgccgtggacggcactgtaatcaaattccactccctgaccgatgcggatcgggcctgagccgatgatgagggcgcgttttttctcttttcggctgatatctccgtcgctttccccgaggtaggtggagtagaaataattcgtcttggcatcaaattcagcggcgcatgtatctacgattttaaacgacgggacgatgcctgatttctttctgagagcacggatgtcttcttccgtttttcccgtgagagatgcgatcatgacatccgtgaagccctttaccttcgcctgctttaaaagcgggacagacagatgatccccttcttccatcagcttgttttccaatgtgatgatatttcggaacacatggagaaaaaacgggtcaattttcgttttggcatggatgtcttctatcgtttcaccgcggcttaacagttccatgacgacgaaaaatctccggtcatccggcgttaccgctaattcccacagctgattaatcgtacagccgccgagttcaggcaggcgggtgccgatcgttttcagctcaagggaggccgccgctttttgaatggccgcttccatatttctttcgatcgccatgacctctcccgtcgctttcatcttcgttccgagcgtgcggtcggcatgtttaaatttatcaaacggccagcgcgggaatttgacgatgacataatcaagcgccggttcaaagcttgcataagtagagcccgtcagcggatttttcagttcatcaagcgtatagccgacggcaagtttcgccgccattttggcaatcggatagccggtcgcttttgacgcgagagctgaagagcggctgacacgcgggttcacttcaatgacatagtactgtttgctgaacggatccagcgcaaattgaatgttgcagccgccgaccacatccagcgccgaaataatcgccaggcttgctgaacgcagcatctgatattcttcatccgttaacgtctgggacggtgcgacgacgatggagtctcctgtatgcacgccgacgggatcgatgttttccatattgcagacggtgatgcatgtatgattgctgtcacgcatgacctcatattcgatttctttaaaaccggcgatgcttttttcgacgaggcattggctgatcgggcttgctaacagcgcctgtttaataagcgtctgaaacgattctttcgttttcgcgattccgcctccctttccgcctagcgtgtacgccggtctcagaatgaccggaaatccgatagactcagcgaagcggagggcgtcttcttcgttgtcgacgatttcgctttccggaacgggctgatcgagctctttcatcagggcgcggaactgctcccggtcttcgcctttttgaatggtttccaccgatgttcccaaaagcttgacgtgatgcttcttcagcacgcctgcttcttcaagcttaacggctaaattcaatgccgtctggccgcccaaattggcaagcagaccgtccggtttttctttttcaataatagcctcgatgctgtcggttgtgagcggttcaaaatatatttcatcgacaaacgcctcatccgtcataatcgttgccgggttgttgttgactagaataacgcggtatccttcttctttcagagccatgcagccctgcgttcctgaataatcaaattcagccgcctggccgatgatgatggggccggagccgatgactaatatgctggaaatggttgtatctttaggcatgagcgatttctctccttgctggtatcactttctctagaaattcatcaaatatccactcgctctcagccggtccggggtgagcttcagggtggaactggacgcttaatacgggaaggcgcttatgaatgagcccttccactgatgtatcattgacatggtaaaatctgatggacagctcgttttcgtcaattgatgcttcatcaacgacatagctgtggttctggcttgtcataaacacccgtttcgttttccggtcaatgacgggatggttggcacccctgtggccgaacggcagcttatacgtatttcctccgaaagccagggcaatcagctgatgcccgaggcaaatgccgagtgcggggaaatcactgagtaatgatgtaatccggttcatgtacggcgcaatcgctttcgggtcgcccgggccatttgagagcacgattccgtcaggctgaatgtcgtaaacagcgttcatctgctgatacggaatgaccgttactttacagccgcgctttacaagtgatgaggcgattgattttttataaccgaaatcaatcagcgcaatatgccggtctccgttccccattgacgtgatgtcttcagactgcgccagctccgccgggttttctgttacggatgctgcgggaatctctcctgttgttgacacggcagcgttcatcgtgccgccggagcggatggttttgacgacggcccgtgtgtccacttcggttaagagcgggatgttccatttatttaaatactctctcaagcttgagactgcttcatggtgagaaaaatgttcacacgcttcatagacggcaacagccttgacttgaggaatcttactttcaaggtctttttcattaattccgtagtttccgatcagcggatacgtaaagacgatgatctggcccttatatgacgggtctgtaagcacttcctgatagcccgtcataccggtgaaaaaaacagcttcgccaacacagcgggcctctttttcaagttcaccgccgaatgatgttccgtcttccaatactaaatagcctttcatctaaagcccacctcttgatgaataattaattaaaaatatgaatttttatacttttataccggaaaaaaattaccgtttcactgccgaatgcgtttcgatcgctgctttcagcatactgacggccgacagcatttcttcttcagaaaccgtaagcggcgggagcagcctgatgacattctgtccggccggaagcacgagaagtccgcgttcctgcagatctccgatgatgccggacacgggacctgcgcattcaatgccgattaataacccttttccgcggatttcttttacaaaaggccctgtcagttcacggttcagctgcgcttttaaaaatgatcctttgtctgccgccgcctggagaaagtccggctgaaacacaatgtccaaggttgctttcacagctgccatggcaagcttattgccgccgaaagtcgtaccatgcgtacccggcgtaaaggcgtcgccaagcttctttttgccgatcacggctccgacgggaaaaccgtttccaagccctttcgcagcagtgatgatgtccggagagatgccgaaatgctcatagccgaatgccttgcccgtccggccgattccggtttgaatctcgtctgcgataagcagcgcctgtttgtctttgcaaaatgtctgtaaggcttcgatgaattccggatcggcgggattgactcccccttctccctgcaccgtctcaagcatgacggcggcgatatcatcctcttttgaaagcgtgctgaatgccgacggatcattgaacggaagatagtgaaagccttgaagcatcggtccgaaaccggtcttgattttgtcttgtccggtggcggccatccccgcataggtccggccgtgaaaggattgatgaaatgttacgatttttgtctttcccgttgctttacgggcaagcttaatggcgccttcattcgcttcggccccgctgttgcagaagaaaacgagatcccccgcgctatgttcggcaagctttgccgcggctttttcctgaagatcattttcaaacagattggaaacgtgccatacgctgtcaagctgttctttcaccgcttctgtgacctcatcatgacaatggccgagattggaaacggcgatgccctgaataaaatcgagatacgtttttccgttttcatcctctgcgattgtccctttcgcttttttgatatcgataggccagcggctgtaggtttgaaataggctgctcatgacacgctctccttttccttgacgatttttgttccttggaaggcttgattggtgaaaaacgctccttttccgcttacgatcatcacttcctcgacatcttcactcagtgccgataatgccgagtttaccttcggaatcatccctcctgaaatcacgccgtcatctatgagggcctgaatctcttgcggcgtcaaagtatccagcctgttctctccgtccataattccttcgacatccgtgacaaataaaagtttatcggcgtgtaaggctgaagcaacggccgatgccgcggcgtctgcgttgacgttcagcgtttcgaaatcacttgtcatggaaagcggagcgataacgggaatgatgccttctttcattaatgcgtgaatgattgacggatcggttttttgtatttcaccgacttctccgtatttgtcttgattaaggtaagatgcttgaaggagaccgccgtcctttcctgatattcccgcggctttcagcccgtttttcgcgagttcggttacgaaaaatttattgatcgtccctgacaagaccatttccgctgtttccagcaccggtttagtcgttttccgctgtccatcgacaaattccgtttcaatctgcaatgttttcagcattcttgaaatgtccgggccgcctccatgcacgacggcaatgttccagcccgattgcataagctcttttacattttgaaaaaaatcggcggataactcgcggattacgcttccgccgcacttaaaaacgatggttttcttcatgccgctcccctttgttatgtgcgatagctcgcattgattttgatataatcataggttaagtcacagccccatgcccgaccgctgccggagccttcctgcaggcggactgcaatcgtaatctcatcacctgataagtactccttggcatcagtttccgaaaacggctgaggttcgttgtttttaaacagacactggccgccgaggaaaacttccacttgttcggccgttacgcttgccgcactgtgcccgattgcgccgatgatgcgcccccaattggcgtctgtgccgtaaacggcggtcttcacaaggcttgaaccgacgatttttttggcgataatattcgcctcaaggttatttttcgcgccttcgactctggcttcaattaatttcgtcgctccttcaccgtctctggcaatatctttggcaaggtcttcgcatacaagctttaatccctttttaaaagccggccagtcagggtgatcctccgccaggcaatcattccccgcgcagccgttcgccatcacaagcaccatgtcattcgtcgatgtttctccgtcaacggtaatttggttaaatgaaacatccgtaatctctctgagcgcgtttttgagcgcctgttcttccacggccgcgtccgttgtgacaaagccgagcattgtcgccatgttggggtggatcatgccggagcctttcgccgctccgccgatcgtgatgatgtctccgccgatcaccagttcataacacgtctgtttcgtcactgtatccgtcgtcaaaatggcttcttcaaatgctccggacacggacggcgcttgaccgagctgttcaatacccgcctgaatttttttcatatctaaaagctcgccgatcaccccggttgacgaaaccgcaacaagctccggctcaatgccgagctggctcgcgaagccgtcccgcatttcataggcgtcctttaatccttggtctcccgtacaggcgttggcaatcgcgctgttgacaataaccgcctgaagcacaccctcttttttcaagctggcttgtgtcactttcaagggcgctgcctgaaaatggctctgcgtatataccgctgcactgactgcaggcgcttcgctgataatcgctccgagatctttttttgaatagcgcagaccgcagtgcacgccctttgcctcaaaccctttcggcgaggatacgccgccttttattttcgtgatttcctcactcagctgaatcattttttcgaatccctctttcgttctatggatagactggcgtcatcgtaagtcccgtttcttcctgccagccattcatgatatttaaattttgaaccgcctgccctgcggcgcctttcatcagattatctatgacagaaacgatggtggcacggtttgttctttcatccacggtgacactgatatcacaaaaattgctgccgtatacctctttcgtcgccggaaattcaccttccggcctgattctgacaaaatatgaatctttgtagaattcggaatacaattctcttacctgtgcagcagacatacccgggggagcctccgtatacatcgtcgccataatgccccttgtcatcgccgccaaatgagcggaaaacgtgatcgggcctatgccgggctgccaagccgctaattgctgttcaatttccggagtatgctgatgctcattaaccttataaattttgaaattatcattcagctcagaataatgagtgcccattgatgcttttcggccggcgccggatacgcctgttttcgcatcaacaatcagaaatgaatcttgtaaaagcttattcttcgccagcggggcgagcccgagcagtacagccgtcggaaaacatcccggattggcaatcagctttgcagtctgaatctcttctttttgcaattcagctaaaccgtaaaccgcgctttgaatcgttcctttcggagcggccttccgcttataccacttttcgtacacggccgggttttgaatccgcagatcgccggatagatcaatgaccggaatgcccgcctccgccagcttgggcgaccactctccggagacgccgggcggcgcggctatgaacatgacatcaatttcgtttcggatcgtttctatatgaagcggctgaagtgattgtgacgctatattcctcaaatgcggatatgaagcggcatattctttcccttcgtcgctcgatgaatataatatacaatcctctgcataagggtgatggttaagaatcctgacaagttcggcgcctccataaccagtagcgcctataatacctattttcaacgggttcaccttcttggtttttgtgaaattatttaacattataacatgaataaaaattaattcaattgtatatttaatattttttcattcattttccatctgttttcgctgacaaaaaaccccctctcgatcgagggagttccataagaaaaacaggctgatcggatcagcctgttttcttcagcatcatcagcccgcttataaaaaacagcacggagctggcgtaaaaaataatataaaccgtaaagaaatcagcgagaaacccgccgagaataatggcagcagctgaaaatacggccgtccagaaatgatagctgccgactttttttccccgctccccgccgtcggtgtaatcggcgatcatgattttctcgccgtgtttttgcatcgcgccgaacaggcccaaaagcacctgcacaacataaacctggtgcacgccggtaatgtgcgggagcgtcagaagaagcaccgccattccccacgaattcgccataaggaaccagcggggatccagtcttgccgacagccggccgagcagcggatgaatcaatgcgccgctcaggccgaacaagccgtatgagagaccgaattgcgtgtagctggaaccgatgtttttaataaataaaatataaaacggaaagatcaggctgccggcaaaaaagacactgctctgtgacaggatcagccattttaaatggttgtgtttcatgatttgtacctctgataaaaataattcataaacaagtcatccggatcatatttgtgttttttctgaaagaacatatcgcttttcggatatgcctcgcgcatctgctctttcgtttgatacagcatatacgggagataataactgccgcggtggcgcaatgccgtatccgtcatttttctgacaatccgcgccgcactcgcctggctgtcttttgaaaacccttcattgattaaaagaacgagtgaaaacatgtcttcctttgcgtatgacagatcggctttttcatttttttgcacgtagcggatcgtaatatttacgagattgagatcttcatgtgacagcgtcttgcgtaagtcatgaatgtacggcgcaaattcgccgacgggtacgaagtattcttgtagcacgtcggtgttgtccgtgttttcatattccaaaaatttcgactctgaccgcatgacattgttcctggagactttcacgccgttttggctgagaaaataagactgctgagttgaccagaaccaatttctgccccagtcataccggcgggagaggccgagcgcgaatttcgtcagcgccggatgctcatcttctttcagttcattgtgccgctttaattctttctgattgtctgagagtgtgtaatcagtcacatacatatcgtgcaaaaagcctttatcccctgttgcgatccgcgcgagatgtatgcgcacggcggggttgcgctgaacatgctgcgtaaaatattgactgtatgtatcagcgttcatgcgtttcgttttcatttcataaagctcatcatccgtcagctcaatatccgcgtcaaggatgacgccgaacaggccgtagccgccgatgacggctgaaaacaggtcatctttcggagtaacggtgatgactttgccatccgcctttaaaagatgaaacgatttgactgtatcaatcagcgaaccgtaccggatatcccggccgtgggcgttggcgctcagtgagccgccgatcgtaaaaatgttttgcgattgcatgacttttaccgcgagcccgtacggattgacataccgctgaatatcattccacgtcgctcccgcctgcaccctgatgatttttttctttcggtcgagaccgagtattttgttgtagcccgtcatgtcgagaacgatcccgtcttcataatacgtctggccgcccattgagtgctgggcgcctgctattgagatcttcagatgctttctctttgcttccttaatggtttcgaccaatgtttctttctcttttcctttgaccgtctgcttaattttcacgggcatgagtcggctgacatccgtcattgtccctgcctgctgctccggctctttgtgaaaagcggaaacagcgaacagcgccgtataaacaagaatgctaaggataatgagaagtaattttttcttcatggattcctccctcgcatgcagccggtctattatatcatgcctcacgtccgtttttttccttttttacccgatatcgcacaacccccgaatggcgggaaactcggggttttttagtgacttgcccttctttccgcaccccggtctctagcgacaaagcagacagaacggcgcccgacagaatcatgtttagtacagctcgaaacggtcagccggaaaacaccgggcataaaaatacacagaaatccttaaaatgattttttggtcagtatataatcgatatatacgcagatgtattaccaaagggattgtttaaaacaaagatgttaaatgaggtggggaaaataaacataaaaggaatcaatcatcttcttttttctgtttcacatttggaaaaatctattgaattttatgaaaaagtatttcatgcacaactcctggttaaagggcaaaaaacagcatattttgatctgaacgggctttggcttgcacttaacttagaggtggatataccaagaaatgaaatacataaatcttatacgcatatggcctttacaattgacccaaaagattttgatgcaatacatcaaaggttaaaaaatctaaatgtaaatatattaaatgggcgtcctagggataagcaagatcaaaagtcaatttattttactgatcccgatggacataaatttgaattccacacaggtacactccaagacagactgtcctattacaaaaaagataaacctcaaatgaaattttatatataagggtttgtttgcgatccaaaacaaaccctacctgtcgcttatccgcgttgatttttccttctaaatgcagacaaaagaaaagcacctccaaactttaggatgtacctaaaatccgaggtgcattttcttattactgaatccctaatgcgatttttgcgtagcgtgacattttgtctcttgtccacggcggattccagacgatgtggacctccgtctcttttacatccggaatgtcagtgagcgcttttttcacctcgtcgacgatgatcggagcaagcgggcaccccattgatgtcagtgtcatcgtaacgtgcgtcaggccgtcgtcatccatatcaacgtcgtatacaaggccgagattgacgatatcgacgccgagctcagggtcaacaacctgctccaaggcgcccatgatgttttcttttaatgcttcttccacgttccatcactcctttttcctcagtataacgtaaaagcgggttttgttaacacctttgtgctttataaatgcttatcgaaccaggcgacggtttctaaaacggcgtatctcgggactttatggtcagcccgttcgtctttcagaaactgaagatggttaggccggctgctgtaatgaggtttaatcgtttcataaaagccgcgggtcggtgcatacggaacgactttgtcttgaacgccgtgccagaacagcagcgggcggctgcggagtttttccggttccagactgagatcaaacggtttgagccgcgcaaacagttcatcgacctgttcttttgtgacgtcaatgtcgatgtcctgcttttgaatgtggtcaatctgctgctgaaaaaacgccgtatagttcgggcttcccatcaggctgacaccggctttgacccaatcatatgcggccatcgcgccgaatgtcgtaattccgcccattgacgtgcccgcaagaccgatccgcccgtcttcaatcagaccgcgcgcttcaaaatcctttttcagcacgtcaagctcctcgatttcatttaatacaatgtcccaaaaatggacggcgagctcttctgctgacagctgttcagcgcgttcaccgtggtaaagagcttccggcagcacggctctgaaacccttttcagcaagcaggtaagcgaaatgaagattatgctccttcgcgcttgtaaaaccgtgaataaagaaaacaaggggagcgggacggtcccgattttcttcttttacaatatgtaaaaacggaatgcctgatacggtttgatgatcaataagaatcacgttgactccctccttaggataaccataatcataagtgtaacatgtagacaataaagatggtaaaaagctacactgtacataagagaaaaacagcaaattatatgacaaaaggagttatttatggagacaaaaccttacctcatcgccttagatctggatggaactttattaaaagatgataaaaccatttcccctgaaacggcacggacgattcagacgctgaaagaagcaggtcatcatgtctgcatctcaaccggccgcccgttccgttccagttcgatgtattatgacgagctcgggctgacaacgccgattgtcaattttaacggggcgtttgtccaccacccgaaagacgagtcatggggacgctaccacacgtctttatctgtcgatgtggtcagacagcttgccgaacttacagagacctatcaaatacataatgtgctcgctgagatcattgatgatgtgtacttccattatcatgatgagcatttaattgaggcgtttcatatgaatacggcgaatgtcacattcggcgatctgcgcgaaacggtccaagaggatgtgacgtccgtattgattcacgcgaaggaagaggacgtcgcggacatacgcgcgcatttatccgatgtgcacgccgaggtcattgaccacagaagatgggcggctccttggcatgtgattgaaattattaaacacgggatgaataaagcggtcggcctgaagaaaatcagcgactattatcaagtgccgagagaacgaatcatcgcgttcggcgacgaagacaacgatcttgaaatgctccgatttgccgggtgcggcgtagcgatgggaaacggcacggatgaagtcaaacaggccgccgaccgcgtcacgggatcaaatgaagcggacggaatcgccgaatttttaaaatcctatttctccctgtgaggttttgccgctcataacacaaagccttccgcccatactaaaacagacgactcatctcgtctaaatatggaagggggacattgcaatgggtaaacgaaacaaatcaaaacggtttattcagcaaggcaaggactctgtcagtcttcatgacgcaagatttccatatcggtctacattagaggaagcacagcatgatgcagcaaaagattcggctgaaaggcaggttgacttttaatgagaaacgaactgttttctcaagccaagtcatttgtccagcaggccgtcatgattgctaacggtttcgaagacggcgatcaggaaaaagctgtctcacgcgccaaaaatgccgtatcttccgcgtacgccaattcgacggatgcagaacgtcagcagctgcaccaatttcaggatcagctggagaaattgcaataaaaaaaggcgccccgtttagacgagggcgccgcttttttattttacttcaaatgtttttaccgttttcagtctttttccgatctgatcggacttccctaaaaacgtcaccgtcaccgtgtatgttcccggaccgggcacgtttttccacacatctgaaaagtcatacgtttcattcggcattaaggtcacggtctgaaacgcctgagtaaacattttgtcttttgaatagcggtacagttctttgtgatgttggtcatgtacggtcaattcgaatttctgccctgagctgaatgtgaaatcgatcgggctgccgctcttgttttttaaagacatttgaaattcgatctgctgatccgtctgcacagggtttacggctaattccgcttgctgttcattcatctctccggatacctcctcagcgggctccttctgcccggattgactgctgcacccgatcaataaaatgaccggtaataacaggccaaacagccacttcattctatccgctcctatcagtcttttctgaagaaaccaaagatccccgtcgtttgcacgatgtttgtgaaggctttcgggtcgacttctttcacgattttctcaaggtcatacaattcgtaccgcgtgatgacgatgatcatcatttctttctgttcgtttgtgtaagcgccttttgccggcaccgtcgtaatgccgcggaccattttcccgtaaatcgcttctttgatttcatcggcttttttcgtaacgatcatggcggtcagtttcatgtggcgggtgtgaatggcgtcaatcacccttgttgtgacatacagagcgacaagggtatataatgctttctcccatccttgcaataatcctgccgtcaaaatgataatcccgttcaaaatgaagaaatatgtgccgaccggcttatccttccatttggccagcaccatcgacacgatatcaagaccgcctgtcgaagcgccgaatttcagcgttaaaccgatgccgatagctgagatgactcctccgaatacggtattcagaagaatatcgtgcgacagtctcatttccgggagaattcccataaagacggacgtcatcgctacgcttaatatgctgtatacggtgaatgatctgccgactttcagccaccctaacacaccgatgggaatgtttaagaggaacatgagaactcctgtcgaaatataaaagggggcgtattgatcaacgacgcttgacagcagctgggcgacaccggtaaaaccgctggcatatacattcgccggtatcaggaataaattcagtcccgccgcatacagaaacgcgccgatgacgacgattgctaatttttttgcttgttctagtaccatggcttgctcctccgctcattttcattattagcttttcccttaaaacaaagttttgaacactattttgccacatttatatgatatagttggcatcactctcaccaatcggaaagaagggaattatgatgacagttcaccttattgctgacagcgcctctgacctgccgaaatcttatattgaagaaaaccggatcgggttcattccgctgcacgtaacacttgacggaaacgaatatgaggacacggtcaccattcaggcggatcatatatttcaagcgatgcgggacgggaaagttccgaaaacatcccaggcatcaccggatacgataaaaaaagtatttttacaatacgcggaactgggagaaccggcgatatacatcgccttttcctcaggtctttccggcacctatcagacggccgtaatgatcgccaatgaagtaaaagaggaatttcccgattttgatttacggattgtagattccaaatgcgcttctttgggctgcggcctcgcggtgatgcacgcgcaaacactctgtgttaacgggaatacaatacaagaaatcgaaacgtctgtaaagagcttttgcgcacggatgaaacatatatttacggtcgatgatgtcgcttatctcgcgcggggcggcagaatttcaaaaacgtccgcttttgtcggggggcttttgaacatcaaaccgattctgcatgtggatgacggcagactcgtgccgctcgaaaaattgcgcggacaaaagaaactgtttaaacggattatagaaatgatgaaggaagaaggcggcgattgggcggatcaaaccgtggggatcagctacgcagataacgaggagacggcgcttcggatgaaggaaatgattgaagaagcgttccatccgaaagagatcattcttcattcaatcggctctgcgatcggcgcgcactccgggccgggtacgctcgcgatttttttcctgaagccataatttcaatgcgggcgggcatcctaacggacagaagggaggctttgccgcatgaaagatgatgacaaaaaaccgttggacaataacgccgtaaatcagaaaaagaatcggcttgccgaaaaaaaccggcaggcgggaaaaaaccagaattccaaaaaaccggaccatctgtaaaagcaaaacagccctcttgtcttagaagaaagagggctgttttttgttctatatgcgtctaacatcacttatcacgaatccgctttcaggcaatgccggcattctggacaggctgaagctcaaatcttgggacggaacatcgtactctatttcattggcaagaaacgcaagggaagttttcatgacttccacggtcattccctcacccggacagcggtggccgttagccggatcacctccgccctggggaatgaaatcaaatttattttcctcccgcccctgaaaacgttccgggcgaaattcattcggattctcccaaagccgggaatcatggtttgtcccatataggtcaagcatgacggaggcaccctttttaaactcacagttcttccatacgaaatcttttttcacaacggctcctaaaaacggggcaaacgggtaataccgccgaacttcatgtgcaaatctttcggcctcctgatcatctctcgatctcagtttgccccgatattcagggtaatcatgcaatgcaagagctgaaaacgtaataaagtaagaaatggcggcaatcgggcgcagaacattaataagctcaacagcagccatatgagaattaagtctgttcccgtcaagttctgtatgaaaagccatttcatacaaggctgagccctccggcgtttgcagcttgccggaccgcacatcctcaatgacctcctctatccatttctccgttttcagcctcgcccttctgcctttccaatgacgcggtccgacagcgccgaatgcgtctaccatatcggtgaaatcctccgcccgctctttcacttctgagtctttcagcgggacgccggcccactcacaggcagcccggcacagcactttcttcgcttcatcaaaaaggacaattcggtttgaacccttccacatttccgcagatgctttccactgtttttccaccgcttccgcaagccgtttttgccggggcggcgtcatcagtgacataaatagaagcttcctgtgcttatgccgttcaccgtccattgcctggattgcccctgttccgaataacgttttctgcacccgtttggggagggcctgctgccgctgaaatcgttctgtgtcataaaaaagctttgcggcttccgctccgctcatacaaatgaatgtcttccctaataaacgggcgcgaaacacatctgagcgataattctccgctcggtttttcacaaatacataaccatcgcgtaataaagccagactattatcaagacccttttcctgcggaatttgttcatccatcccgattcctcccttcttttttcacctttcacgaaaaagaataaatataaacacatgtatattcagtatttgtgtttcattcagaagttactcatgtcaggctgcaaaaatcaggggcggggcaaaaacccgttacaaagtaaaccggcggacctgatcgtttaaccgctctgtcaggctcaccagattattgacgctttccgccattttatgaaaagaagacagctgctcaagcgcggaggcagaaatctcttcgcttcccgcagccgtttcctgaacgacggcgctgatgctttcggcatgatgcagcacttgctcaccaagctgtttcgattcgatgatccgtccgtccaattgtgtaagctccgctttaatatgggcggctttttgttcaatatgggcgaatgattctgacgttttctccatcagttcctgctgtctgtccgctaaagcgacgccggtcgtgacagctccggtaatagatgtgatgccgtcttcaatttgctttaccatatcgaaaatctgcgcggtcgctttggctgatccgtctgcgagcttccgtatctcctcggcaacgacggcaaatccttttccggcctcgcctgctctggccgcctcgattgcggcgtttaatgacagcagattggtctggcccgcaatgtcagaaacggtctgcgccatcatactgattcctgccgcatgctctatgaagagaccggcggcttcggaaatctcttttgatgtctcattgcttttatcaatggcttgcttggtctcggctaaagcaccgcgccccgcagccaccgccgcaatcgtctcttcgctgcttctcgtcgtttgttttgaacgttcggcgttcgcctttgaatgttcatccatttgttcaatgaattgcaccgcatgctgcagatcttctgaaatggtttgggagccttgcgccatttcttccgtcgacacggacacctgctcggtcatgtccttcagcgtctggttttccttcgtcaaaccttccgcgaaagtctcgacttcacggccgacctctccgatcgcctgaattaaggtgcgaagctgttcagccatcattccgaatgagtcattcagctctttcagttcgtccttccctttataatcaagcatttcaacagcaaggttccctcctgcaatacgacgggcattttcagccatacggcggatcggccctgcgattctcttcgtcagcctgatggaagatatgacggtaacagtaagtatcacgatggtcagcacggctgcgctgtaaacgataaactgaatctggtcagccgtctgcttctgcatgtcttcatagtgatcccggcttttcagattcagcatataaatatcattcagaagaccgttgatgcgggccgccgtccttgtcgcttcagccgggcttttcgaatcaagagcagcgtccgcctccgcctgccatgtttcgtattttttggcgagtttgtcataagcggctttgtccgcatcgtccgtcatcgtttttttgagggccgccagtttgtatgagctgcttttcatatagcttcgtacatcttctttctgggcgtctgcgagcgtataggaatagccggtgatgctttcttttaacgtattaaggtcagcttttgcttcctggacgtttaacagcgcgtccacttcatcttcatttgaagcctgaatcttcatcatgtttacaatggtaaagccgatgacggcggcgaagcaaatcatcgtaacggctgcgttaacgagcagccttgtccgtaatgtcacttcagatcgcctcctttttcaatcaggctgtttttcatatccgtgatctttttcgtcagcccgcctgcgtttttgacaactctgatcttagctaagtccatgccgttttccttcagtccgtaaacgatctctccgcttttgatctccttgttgtcttttaaatctttcgccaattcatagatgacttggtcgacgtttttcactaaagaagagataacggcgtgctcggcggtgtaatattgatcgctgtcaacaccgatggcatatactttttgcgcctccgcttctttcagagcgccgacacccgtgaagccggccgccgtaaacaggacatcggctttttttcggatcatgttttgggcgatgcgcttcccgagcttatcatcatcaaacgtaccgctgatgtccgacagcacgcggatattcggtttgactgatttcgcccctttcagatagcctttcttaaaccgtttaatgacgtcggcatctgaaccgccgataaatccgatcgtgccggttttgctcgtcatggccgccagcgctccggctaagtagcttccttcatcctctttaaacgtgacggaggtgacattatccaggtctgatacggaatcaatcagcacaaaccgctgcttcggatattttttggcgaccttttctaaatccgcctgcatgctgtaaccgagccccacaacaagatcattgccttcccggacaagctgggtcagtcctttttcgtatgtaccggtatcttttatttcccgatagtcaaatgtgatgccgagctcgtctctcgctttcatcaaaccttgaaagcctgaatcattaaatgattggtcgccgagaccgttgtctgtcagcatgatgccgattgttttcgttttgtcggccgccggttcctcagatttgccggcacatcccgccgtgctgagcgcaatcagcagtacagccgcaaatatcgccatttttctcattgaaactctccttttgtttttttctatagttatatatcggttcggatgtcagaatattttatttcaataaaatatgtatgttcggcagggtgataaacaaatgagggccataggagcttttgagaaaataaaaaacatcggttttggttcaccgatgtttttgcagaaaatttattgtttttcgtatgtccagccgtcttcctgatacactttgccgtttttcatcaggtgcccgagcgcccgcttaaaggcggctttgcttaaatgaaaccgttcgcggatatcgtcaggatggcttttgtctccgtatggcatcgcgccgtttcttgatctcagataggtcagaatttcttccgcgtcaaccgaaagcgcatcctgctttctcggcagcagagacatgttgaccgagccgtcttccttcacctcgatgacacgccctgtcacgcggctgccgagtctcggctcttcttttctttctgaagggtgaataaacgcgcggatgccttcatcggtaatcagaaaagagcctgatgcgatcagtctgtacaccgtacccgtcaggtctttattcatgacgtcttcccctgcatccgtaaataattcactgatgatatcttcaggcgccggcttggcaaacatgcgcccgcggcttgtcaccttcagcatgcaatacagtctgtctcctttttgcggccagacggatttgtacggaggcaggtgctccgttgcgacgagcgcgtcttttgacagaccgacgtcgacgaatacgcccatatcttccacagcgtccgtcacttccacccatccgtagtcataaaagctgatgagcggctttttcatcgtcgccgcgagtctttcctgatgatcgacgtaaataaatacgtccacttcatctttgtcttcgatatcctctgtgatttcactgttatgtaaaagaaccgtatcctcgccgtcggttaaaaaataaccgaaatcggtttggtgatctatactaagcgtgagctgctgccctggtctcatgttatcgtccttcctgattcgcccgtatgaggctgatgtttttctcattttttccaatatgcataaattcatgccttatgctgttggacatttctctttattctactataatcaactcataagtgaaatgttataggaggttttctcatggcaaaagaaagttcttttgatattgtatcgaaagttgaatttcccgaagtgcagaatgcgattcagatgacgctgaaagaaatcggcacgcgctatgactttaaaggatcgaaaagcgatgtaactttagaaaaggaagaacttgtcctgatttctgatgacgagtttaaactgaatcagctcaaagatgtgctgagcggcaagctgatcaaacgggacgtgccgacgaaaaacattgaatacggcaaaatcgaaaatgcctcagggggcacggtgcgccagcgcgcgaagcttgtacagggcattgataaagacagcgccaaaaaaatcaacgcggtgatcaaaaactccggcttgaaggtcaagtcgcagattcaggacgaccaagtgcgcgtcaccggaaaaaataaagatgatctgcagcagattatcgcagccgtccgcggagcagacctgccgattgacgttcaatttattaattttagataaattatgtgattcctattgattattgtctctattttcggtaaatttggagaaagggattttcacagttaagttttggaaacccatgacaattacatgaacgttcttatcaagagaagccgagggactggcccgacgacgcttcagcaaccggtgtagtggtttacccaaaccatgaccaaggtgctaaatccagcaagctaaaaacagcttggaagataagaagagagacaaatgattacaaagtcttcttcttaagaagactttttttatttctcttttttccttgctgaatgtgacgaaggaggcaaacaatgggactattacaagacttaaaagaacggattttaatcggtgacggcgcgatgggcactctcctctattcctacggcattgacagatgttttgaggaactgaacgtatcaaagcccgaagaaatcaagcggatacataaggcttacgtggaagccggggcagacatcatccagacaaatacgtacggcgcgaattttattaagctctcaagatacggacttgaggatgaaacgaaaaaaatcaatcaggaggcggtcagaatcgcgcgcgcttcctcagacggcgcttatgtattgggaacgatgggcggcatccgcacctttaacaaaaacgcctacagcctggaggagattaaacgcagctttcgggagcagctttatttattgctgcatgaagagccggacggcctgcttctggaaacatactatgatttagaagaggcccgcgaagtgctgaagatagcgagaaaagaaacggaacttccgattatgctgaacgtatccatgcacgaacagggcgtgctgcaggacggaacgccgcttcgggaagccctcaggtccattgccgatctcggcgctgacataacgggaatcaattgccggctcggcccgtaccacatgattgaagcgctcaccgaagtgccgattttccgtgacgcttatttatcggtctatccgaacagcagccttccgtctttagaagaaggccggcttgtttatgatacggacgatgcctatttccgggagagcgccgtacagttccgcactcagggcgcgcgcattatcggcggctgctgcggtacgacacccaaccatatcagagccatggctgaagcggtccgcggactttcccccgtcactgataaagaagtgaaaatcagacgggaagaagaaatcatctcagtcagcagcgaacggaccgagccgggtttaaacgaaatcgccgctaaaaaacggtcaattatcgtggagctcgatccgccgaaaaaattgaattttgaaaaatttctgcaagcagcggctgaattaaaagaaaccggcatagaagcgctgactctcgccgacaattcattggcgacaccgcggatcagcaatgccgcctgcggttcattgctgaaagagcgccttgatatccgttctctcgttcacattacatgcagagaccgcaacatcatcggccttcagtcacatttaatggggctggatacgctcgggctcaccgacattttagccatcacgggcgatccttcaaaaatcggcgactttccgggggctacttccgtctatgatttaacgtcctttgacttgatcaggctgattaaacaattcaacgagggtatttctttatctgggaaaccgctcggcaagaaaacgaacttttccgtagccggagcatttaatccgaatgtccgccatcttgataaagcagtaaaacggctggagaaaaaaatcgagtgcggagctgactacttcgtgtcccagcctgtctactcggagcagcagctcattgacattcatcatgaaacgaagcatctcaaaacaccggtgtatatcggaatcatgccgttaacgagcagccgcaacgcagagttcattcatcatgaaatcccgggcattaagctgtcagacagcatccgcgaaaaaatggcgctcgccggcgaagacaagcgaaagcagaaagccgaaggcctcgccatcgccaaatcgcttctcgacacggcgtgcgaactgtttaacggaatttatttaatcaccccgtttctccgttctgatttgacgtcagagcttgcagcttatattaagcaaaaggatgaaaagcgggctgatgtatatttgcattgacgcggaagaggccgcctgatatgacaggcggctttttcatggtacgatacagaaaaagaatcaagcaaaggaggattttttcatggttgaagtaaaacccatcaccgcagaagacacatacgcgatcagacacagtgtgctgcgcccccatcagacgattgaggattgtaaatatgatcaggacagcgtcaaaggagcctttcatctcggaggtttttacgacgggacattgatcagcatcgcttctttctacccgcagaaccagcaggctttacaggcagcgcccgcctaccagctgcgcggcatggcgacgcttgaggaataccggacgcaaaaagcgggaagcacgttaatcgcctatgcagaacggaaactggcagatatgggggcggcgcttgtctggtgcaacgccagatgtcacgtaaagggatattacgaaaagctcggctggaaaagcacgggcggcccctttgacatccccggcatcggccctcatgtgatcatgtataaaaaactcgcctgaaacagactaaagcctttggggacatgtctctaagggcattaccttgaaggtcacgtccgcttttatatgcgacactattgacgccctcccgcttttttaataccctttgtacattacacaacagcaaggatggcaggcagaaaacaatatctgtcaattgccgttttcagctattaattcagaaaaggaagtatgagatgaatacgatccaaaaaccgaaaatcccgaaagaattgccggtgctttctttcacagaagcgcttcaggacgacctcatcaaagaagtcgtcatagaaaacgccgtgataagcggcaaactggacggcctgcgcgccgaaaaagtcattttcagaaacaccgtttttacggatgtctctttcagacatatggaatgtacggatgtcctgtttgacaaatgtgatgtctcaaacgctgatttcagcggaagcatcatccatagaacggcgtttcagcattcaaaacttctcggcttgaatctggcggattccgccatgcgtcatgtacggtttgaagactgcctcgcaccttacagctccttcagctattccaatatgaagcatgtccggtttgactcgtgcggcctttcagaaagtgagtggaatgatgccgttcttgaatacacagatcttgacgcctgtgatttgaacggctcaaattttatcggcacgtctctttttaatatagatatcagcacgtgcacatttgatcacctgcacgtctcacttgagaagctgaaaggatgccgcatctctccgtctcatgccgtgacattcgcagaagcgctcggagccattgtgacgtgatcttttattaaatgaaacggcgggcgatgtccgctatcgtttgaatgcctttttccaagtccggcaaggatgcgtacgaataggaaagacgcaggctttgccggtcttcgggaagatagagagctcccggattgatcagcacaccggcctccaaagcacgggtgaaaagcgtctgaacggcgaatgctttatggaaggtgacccaaatataaaagcccccctccggcacatgccactccgcaatatctcccgcgtatctttcaagaaaacgcaatgccgcatctctcctgattttgagttcctttctgagacgcaaaaggcgcgcttcatagcggccgcttgacagccattgacatgccgcccattgagataaaccactggagccgtaatccgtctgcattttaatatcggcgagcctgtctgcaaccggctcaggggcgacgacccatccgatgcgcagacccgggcttacggtttttgacagcgtgccgatatacagtacattcccctcaccgtccatcgattttaacggaggcggcggttctttatcgatccataaatcaccgtatgcgtcatcttcaatgacaggcagacggtgatttcttgcgagcgcgatgagttcctgccgccgcttaagtgacattaccgttccggtcggattatggaatgacggaatggtgtacaggagccctgcttcgtattgccgacggtaagcgggaagatgatccgttttgattccgctcccatccatcggcactcccttaagcctgacgcccgctgattgaaacacacgcagggaatggagatacgacgggttttcagtcagcatgacggagtttggttttagcagcccgattgaaataagctgaagcgcctgcagcgcgcctgagacgattacgatggatgccggggacgcgtgaaccccctttgttttcaaatgtttcgcgacgctttgccgaagctgcgggctgcccttcggttcttcatagccgagcgcaaaaatattagttcccgcttcacggaacagttcggccatctcctgctcaggcagcagctcttgactcagctcacccgtccccagcctgatcagatccagacacggctcgttttgattaatggcctgaatcaaggatgaattcggctgatgactccccgatgtaacgtacgtgctccaatcaaggggcttagccgctgccatgatgctccacgtattgttgacgacctttgtgcctccccctctttttccttccagaagaccttgggcgattaactcatcaactgctgccgtcactgtgcttcggttgacctgaagctcctcggcgagctttcttcgtgagggaattttcgtgccgatggtccattcgccatgaagtattttttcttttatatgctgttcgatctggagataaagcggtatgtgcgactcccgatccggacgccagcggttcatacgtcatccctccttctttatttattatacatttggctggttcaagtaccagccaaatggccggagacatcagcacacagtgcggctacaatgagatttagttgacgattggagggttttacgaaatgaatgccattcttcacggagtgatgctcgctttcggccttattttgccattgggcgcgcaaaacgtgtttatttttcagcagggagcctggcaaaaacatgtgtggcaggcgtttcccgcagtgattgccgccgcggtatgcgatacgattctcatcagcgcggccgtcgcaggcgtgtccatgattattgcagagattcccgtttttcagaccgtcatgcttataggcggctttttgtttctcagttttttaggctggcagacttggagaagcaaaccgcaggccgaacaggtgaaaaaaacggttttctcggcaaaaaaacaggcggtcacggccgccatggtatcctttttaaacccgcatgcgattttggataccgtcagtgtcatcggcacaagctccgccgcctatccgggaattgataaatggctgtttgccggtgcttgtatcgcggtttcctgggtatggttcgccggactggcattcgcgggacggctcgttcaaacggcggatacaggaggccggctcctcggcatcctgaataaatgctcggcattggtgatgtggggtgctgctttttattttgcggcccttttgtttcgataaaaggaattcggccagaccatgttgaatgtaccgaaaggaagagggggaattggaatgtcagacattttaaagctgtatcactaccacagatgggcaaatgagcaagttattcagcatctgaagaccctgcccgcggcaagcttacagcagaaactggatagtgtttttccgactgtgaacgccgtgcttgtgcatatataccgggctgattacatttggcttcacgtgctttacggagaaactttcgaacaaatcgtctcgcagtttgatcaatttgaaaagcttgacggagattttgaggcgattgaacatagaatgactgaactggacaaagaatacagcgaatttttaaaagaaatggagaacccggaaggtccgatctctatttctcatccgcgcatgggaacgcttcagacgacatatgccgatgtgatccggcatgttgtgaatcacggcacataccatcgcggcaatatcaccgcgatgcttcaccaaatgggctataaaggcgtgccgactgactacatttttttctcatacgaatcataaaaaagcaaaggcctcccgggcctttgcttttttacttcgaatctatcataatccggcatagctggaggcgcccggggtgagctttacaagccttccggttttaaaagattccgtcgcggcgatcccgatttctaagttaatcgcggcatcgatgtctgtcacaatcggcgtttccccttttttcacacattcggcaaagtgctcaagctccagacggtaagcgtctttaaaacgtgcttgaaaatccggaataatttcgcagctgctgcctgactccgttaaaatggtgacatggcttttccgcagcgtaccgaccaagatgcttcccgccgtcccgatcacttcggcgcggataaactgcctcctactttttgttctctggtattaggtcagtccgttttccggcttacgaatttgcggtattcaagcggcgaaatgccttcaatctgtttaaacagtttggaaaaataggtcgggtcttccataccgatggcatccgcgattgtccccattttgtcattggttgcggacaaaagacgtttcgcctccgtcattctgactttattcgtatactggccgggcgtgacgccgagcacctgctgcatgcagcgggtcacgtagtcttggttgtaatgaagagccgatgaaagcgctttgatggttgttttctcctgatagtgctcctgcaggtaccgggcggcctcccatgcgactctttcctttgcggacgggatttggaacgcttccttctgaagatggagcagcagctcttcaaacagaatctgctttctgagcggcagatcggaattctcggcgctgtcatctgtcagcacactgaattgcccggccataaactgcggacgtctcaccttccctttttgcggcagggacaggcggtagcgggacggctcttcaaagctccctttttttcgcctcaactctgaccagttgttcccggttgtttccgtcacctcataatccgctccttcaaaatgaagccacgaataggatgtcgtttcttcactgccttttgtcccgtaatgttcaaggccgggagaaagcagaatatattctccggcttcaacggaaaaggcgttttcgtcttctgtaatgtagaggacgccttctttcacatacagcagatcaaacaccgggaagacccgcctcacatgggtttcgccttttttgaacactccttctcccgcagcgataaagaccgggaacggaggaactgtgaactcgagaaaggacatattttcggccctcctttttaagtcggatttttgcaagaagtttcgtttctctccctttttattataagaaaatggaggtacacttttaaacgttgattttttcaggaaaggggttaaaagaaatgaaacaagcgattttaaaacgggctgcattcaaacaatcctctgatcacaaactctcattatacgcgctgacttggccgatatttattgaggtttcattatatatgtttatgggaaacgccgacactcttatgcttagccaatactctgacaacagtgtggcggccgtgggtgtcagtaatcagattttaaatttaattatcgtgatgttcagctttatcgcaacgggtacgacaattgtgatttcacagtttttaggatctaaacagaaaaaagaggcgcaggaagtggcttatgtatcaataggagcgaactttgtcatcagtctcgccatcagcgccgccatattttttgcggccgttccgctgcttcatgtgatgggtctttccaatgaattgatgccggatgccaaagtctttttgcaggtggtcggcgggctgtccttcattcaggctttgattatgacgttcagcgccattttaaaaagctacggtcatacgaaggatacgatgttcgttacgatcgggatgaatattttaaatattgctggaaactttcttgtcattttcgggccgctcggccttccggtgttaggcgtcgccggtgttgcgatgtcaacgtcctttgcgcggttcatcgggctgatcgcgatgattgtgatcgtcaaaaaacgcatcggactcggtctgacatggcaaaagatttttcacgtccataaagagcacttgcggaaactcctgaaaatcgggattccgtctgccggcgaacagctgtcttacaacatttcacaaatggttgtcacttattttatcgccattatgggcgctcaggcacttacaacaaaggtttatacacaaaacatcaccatgtttatcctgctgttcggaacggcgatcagccagggcacacagattttgatcggcagatatatcggcgccaaacggtttgacgacgcttatgaccgctgcatgaaaagtctgtactgggcgcttggcattgccgctttgacatccgtgatcatgaccttgttttcaaagcagctgatcggaattttcacaagcagtcctgacattattgcgacggcgagcatgctgatcgccatgacgatcattcttgagcccggccgttcatttaatgtcattatcatcaactcactgcgggctgccggagatgcaaaattccccgtctacatggcgatgatttccatgtggggtatcggactgcctctcgcttatctgttcggcatccatttcggattagggcttatgggcatctggatttcatttatcgcggatgaatgggtcagaggcattcttatgtacagaagatggcggtcacggatttggattcaaaaagggattgcataaacgcccgaagcttcgttatgaagccgggcgtttttttatgcttgcgaaagctgttttctcatgtcaccgagctctgaccggtaatgtgccagcaaaccggtaacggcgggccttgagtataacggaaacagctccagctcttcagacgcctcctcgaaatacgcctcggcctcgaatgcgatgtactcccatacattcataaaagctttgttgacggtatggctctccagctcttcttccgtatagccgaattgcatcatcacctggcgcggtaggcgctttttcgcccgctcatccgtatggacccccagaagcacccgggtcagctgaatggctgctcctaatgaaacggctgcatggcggagtttctcttggttccggcgcgcacaaaccggcagcagcagcaggccgagggctccgcctgtttggcccgcgtacatcagcaggtcatcaaactcttgataagttactttttctctgtcagagatttggccggcgataaactcacgtaacggctcttcttcaagcgcaaattgctgccgcacatcggtgagcgcctcccacaaaaagccgtcggcgcgtgtcccgttcagaaagtcttgtgccgcctgttcaaatcctccaagttcctgcacatcaagccgatcagctacgtgaaacaaagcaagcaccgcccatgcggcccgcctgttttttggcggcagggatgagaaagtccgtttatataaaggaaagtgcgcctcggcaagctgggcgcatgtttcgtattcggtcatggtatcactcctctgttttttagtgtaccatatgtttcacaataaaaagaccgatatccttcagcggaaaccggtcgcggcactgttattcttctatatcgatacggtacgcctcaaaccatgtatggatctgggcaagatgggcgatcagctgcgggcctttcatcagctggccgaaccacggaacctgaaaagatgaaccttctgtctccagcagcatttccagcttctttctgtcaagcagggtgtgaagcacggaatctttctgttgtaaaatcgttttcagccattctgtgaccccctgcgtgtatttcgggtgatgtgttttcggataagggctttttttgcggtacaaaatatcttcaggaagcagtccttcaagcgctttccgcaagatgcctttttcccggctgccatgcattttcatttcccaaggaatattccaaacgtattccacaagtctgtggtcggcgaacggcacccgtacttcaagacttgcgcccatgctcatgcggtctttgcggtcgagcagatttgtcataaaccaaagcatatttaagtagaacagctgccgtctcgctttatctgttcctgtctcaccgtctaacagcggcgtttccgcaatggtttcttcatatctcgcattcacgtattctctaagattcagccgtttttgccacttttcatccaagagcgtgattctctcctcagtcgacctcatccaaggaaatccgtcttcttctgccgcggtgtgaaaccacggatatccgccgaaaatttcgtccgcacattctccggaaaggctcacgacaaaatcttttttaatttcccggcagaaccataacagcgaggaatcaacatcagccatgcccggcaggtctctgacgagaacggattcctccagatgttcaaccagctgatcctgcgtaatcacgcacttatgatgctgtgtgccgaatgcatttgtcattttatcgatccacgggccgtcatcattcggctgaaaggcgctcgctttaaaaaatttgctgttctcctcataatcaattgaataagtatgaaggggatctctgccttgtttctcaaaatgagcggcggctatcgcggttatcgcgctcgaatcaagcccccctgataaaaacgtgcaaaccggcacgtcagatacgagctggcgtgtcaccgcatcctgaaataagtaccgaatgtgagccgcggtttcatcgaggctgtctgtatgcttttcgctctttacattccaataacgccatatggacaaaccgtcctttgagaaagtgaacgcatgggcgggacgcacctcgtgaattcctttaaacaccccgcagcccggagttctggacggcccgagtccgaatacttccgcaagtccgccgctgtctgtgcgggctttcacatcaggatgagcaaggatggctttcaattccgacccgaacagaaaggaagagccgtgttctttataaaaaaacggtttgacgccgagccggtctcttgccccgaacagccgcttgcgcttttcatcccagatggcaaaagcgaaaataccgttcaagcggtccacgcactcctcccgccactcaatatagctgtgcagcagcacttctgtatcagaggtcctctcaaaacggtggcccctcgcctgaagctccttccgcaattcctccgtgttatacagctcgccattataaatgatggtgtacgtttcctcttgatgcgtgcaggccatcggctggcggccgccttcaatgtcaacgaccgaaagtcttttatgtccgaataaaacatggggctctccccagacgtttgaatcatcaggccctcgttttgaaagagtgtctatcatattgttcataatatgtttctcttggacgagctgcttttgaaaatcgacccaacccgcaattccacacatgtgatatcagctccaatcccgtttctgtcggtatcaaattcgtttctatcagcactttacccagtttatgcaaagaaacgcagatagttgatttgtcccactaagagttgtatgagacaagcccgatttggaaagaacggaagagaagaaacaaacaaaggagaccggcacggttatgaaacgaaaacagcttttctcagaaaaaaacaaatgggggcgcggcactctgatgatagaggacggcatctgcctcgtcgaaaacgatgaaggcgatatcctgcttgcagacagtctaggaaacgcaggcgtattgatgaaacgcggcggcagatggcagccggcacggatttgcggcggcgcggccgaaatcggcgcagacaccatccccctgctcggcggggaagaaatccgttatgaaaaggcggtcaaacggccgctgttaaccttgctcgattcgctggacgatgaaacgtttctgctgtttctcagccatcttcacgggttcggcctgtctgtatatgattgcgtattttcctacaatcaggcgcagttttccggtgaaggcgtttcgttttatcacttctcggcggatgacgcacaatgcgccctgcagcatcaccgcggcagctcgggtaaacacgacagatttgaatggacggcatctgacgggcggcgctctattatgtattcagcggcaagacaagacggcaccgcgtaacaaacaggccgcaccttttaaataggtgccgcctgatgtatttagctttgtttttcacgctgattgacgcccggcgtttgcttttgccgtagctttttcggtaacgagagtgattgacgcttttggcatcctgcaaatctccttcgcctcatcaacatccccctgtcacggtatttctcattcagcggcacagttgcgcaaaatgtatgcgcaactaaaaaaacccggatgcatccgggtttttcaagcgattgattaaaatacgtgaaagccgatcggcaagtgaaggccgagcagcaccgtcaggacgagtacgataataaaaccgatccacagtccgccggttgatttgccttttttcttgcggatgacgagcatttccatcagtccgatggtaatgatgccgagcagcatttttccggcgtactctccgttccaattcgcaaaacggacgaaaagctcagctccggtcagaataataataatgtagaataagcgcagaatcatatgcgtaatttttgcgcccttcgcttttccggaaccgtacagcccgtagctgacaaacaccaggataagcgcaacgacccatgaagtaatatgccaatgtgtcattatgttcaattccccctatcagatcaatctgcctcacttatggtaccacaacaagccgctcggagcattatcaatcgtgcgaaagacacacaattatccgatttggttcgacagcgtgccgatcggttcaattgtaatgtcaatgcggtcccccggctttaaaaatttcggcggcttaaacccttttccgacaccggacggcgttcccgtcgctataatgtcaccggcttcaagtgtcatcccttttgacagcgtctcgattaattcagctatcggaaaaatcatgtcacccgttgatcctgattggcgcagttctccgttcacccgcgtttcaactttcaggctttgcggatcactgacggccgacttatgtacaatgaccgggcccatcgggcatgtcgtatcgaggcttttgccgataaaaaactgtttatgttttttctgcagatcgcgcgctgttatatcatttacaattgtatagccgaatatatgatcaagcgcatgttctttggagatgtgcgatccgctttttgatatgattaccgcaagctccccttcataatcaagctgctccgttacgtccaagtggctgtccactgtttctccgtgtcctgtaacggcagcgggggctttcgtaaaaaccatgggatgctccggtatatccgcctcactccccatttcaacggcatgatcacgataatttttcccgatgcagatcacgttctttgaaggtctcggaataggcgcgcaaagctttacgtcagacagcgcatacataaatgaacccgactcgtcattcggttttttcgcccattccgcaagctgtccggcatgcgcgacaaacttatctcctttttgaatgcactcgatcagcgaacccggaatcgtctcaagttcaaacaattttttttcagccttttgcagatctaagattttgtcatcatcaatgatcagaccgacaaatgttcggctgttcagttcccctgtcgcaaatttcatgttaatcccccatcatttttaaatctggcattcctttatgtattcttcctccgggcgggaaattcctcttttaaacaggctgaaaataagtgtaaaagagtatcaaaaattgtcacttttttagtcatattgacgaaataaaaccttcttgcacaaaatgggttatactattatcatcctatgttttccaaaataatcgagaattggagatcacacgatgaacaaaattgaagaaaaaagattaactttattcgagacagcgcaaaaattcggaatcaatgcgacggagaccatcaggtgcagccaggagctggacagccttttaaacgggtgccggggcgggctcatccaacaaacgaaagacagcgggctgaacccggccgcacaaattgagcacggccgcaccgcaggaaaaaaagaggttttctcataaacgtgatatgtatataaatctgtatcatttatgtatacgacccggcatgcgtaaagcgccggtgtttttacgtctaaagttttttccgctcacaaaaatgtgcatttgtcataagctattttaggcaggcagcccagataagctcctggagtgcagtcatgaaaatcttcacgaaaaggatgtgctcgtatgcccgcaattgtcggagcgtttaaaattaatgccgtcggtacgagcggagtcgttcatataggcgactgcatcaccatttctccaaaagcagaggttaagacatttgccggagcgggcagcttcaataccggagacaatctcacactgacgaattacaggaattcaacgaatgtgtacgataatgatgtaatcgatcagccgatggcaggaaacgcataaaggaggcgccgtatgaatttttacgtcaatcagtcgatccatatcaattacatgcgtgtagaatctgtcagcaattcctccatactgcaaatcggaagcgccggttcaattaaatctctttccaatctgtacaatacagggagttatgttgagccggcgccgcctgtcaccgcggggcagcagactgtaacaacagggggaggtcccggcacctcatcatttgtaccgctccagccgccaagccggtagttttaatgaaggaaacgagacgcgaggtgaatgtcatgtatgatcaatccgtttcatcctacctgcagaatttaaattctttcgtccagcagcaggcgcagcagattcaggagctcgaacggcagctgaaagaattccaaaatgaaatttcaacgctgaaacagcagccttctacaagaatcgatcggctcgagtataaatttgatcagctgaaaattgaacggctggaaggaacgctgaatatcggattgaatccgactgatccgaatgccgtgcaaaacttcgaagtcggccagacatctccgcaggtcggaatgatgcagcaggaacaggcgggccagcaaatgcagcaaatccgccaaaacgtcgatatgtacctgaatgaagaaatccccgcgcttttagaacagctcgaaactcagtatgagagcaggctggacgaaacgaacaaatatcatattattgaagatatcagaaagcagatggacagccggattcagtattatctgtcccatgtcccgaaagaagaaaatacggcgcccgcgcaatatgccgagcagattgccgaacatgtaaagcgtgatattgtcagggccgtcgagcactttattaagcacatacctggtgaaatgaaaggtgatgatccgtcatgatttttacagtgattaaccggaatattgaagtcggcgacatccggtctaccggtgtgtccagttcttccttattattaatcggcgacaccgattccgtctatctgtcttccatctttgacacgcctccggaatctcttattatcgggccttatgtgccgctggcgccggaataatgttaaagcgtatttcacgcctccggaacgccaaaatcaattcagtcgggattgcgagtgtctttcaagcaggcgatacgaatgaaatcaatatgcgggtcaaagtattggccgatcagcgtagtcttgctgtatacagagatgatgaaggctcatttaacaaaaaagaataccagatctttcggcagccggccgtcatgccgttaccggaaacgggagtccaaagcgcattctgccatgaaaacccttcaattcgggtaaggaatgtgaaagttcaaggggtatcgtcagcgtccgtggttcaaatcggatcgacgtcgatcgttctgggagattcgcggctgaaacatattaggcagatcttcacgtcaagctcacaatcacagcagccctgacatataatgacggtgagacttctataaagggtgtcgtttatgccagcaattaccggacctatagctatcaattccatatcgggcggagtcgtaaactttggtgattccttttacctttctccaaaaagctcttctaaatctgcgctcggttcgggagcaggcaataccggagatttcctgttattaaacaacgttgtcaatgcgacaaactatatagaccccgatgtcagcgatcaaaatgtggtcggaaacgcctaaaaagcagccgctctttcagaagagggctgcttttggttcagcgttatgttcgttcatttgctttttttgtttttaaaagcttttccggcggctgttttctgatccattttacaaaccgcacgagtttcgggtcacgccgcagctcttctattcccgcgagcctcgccgcaagctcctgattcgtatagagcgcgtgaacctgtttatgacaagggatgcagagcattgcggtcggaaggaatgtcccgccttcttccttaggcgttaagtggtgctccgtcagccgcacatgatggcggccgcataattcacatgtgccctcggcagaatcggccataattccttctcctttctacatgatctccaatgtgacccgggtgcctttcccgcccggttcggacggatgaacgattaattttttcggcagacgcgctctcagctcctgcacatggctgatcactccgacggataagttgtccgattgcagcttttcgagcgctgtgacaacggtgtctaagagcccttggtcaagagtcccgaatccttcatctaagaaaaagaattgcagcgggtattgcccccgcagctgaatctgggcggacaaggcaagcgcaagcgacagcgatgtcagaaacgtctccccgccggaaaggcttgatacgggccgtttgacgcctccgttcgcgtcatcacgcatgacgaaaccgccttctgaatcgactaatatggcataccgctgccttgtcagcgctccgagacgggcagaggcgtcccgagctacgctttccagctgttcttccgctaaaaattcgacgaatgtattgcctttacatacagactggagcttatcaagcctgtcaatctgtgtctgccagcttttcagttcggcttcaatctctttaaagcgcttatgctgtttttgcataaccgcgaaggcttttgcctgtgctcctttttcctccatggcggcgcctgactcagcctctgcctgcttcagcagagaaacggatgctgtccattcttcctccgatatccggcgctcggctaatttatcagtaacacggctgatatttgccgatagctgttttgaagtgtccaggaactcatcaatttcttttttcatttcctctgcacgcccttgcggaagcagactttttttgacttggtccgggtcggtaaacccggtgtcttttgacctcacgcgccagtcgttttgcgctttctcaagggaggtctcagcatccctgagtgacatgagactccctgattcccggccttttgcgtcattcagtgattgctgcgcctgcttcagcgcgtcgaatagggactgttctttcgattttaacagctgtaattcctgccgcaccgcttcaagctttgcggaaattgatgtttcttcagctgctgttccgagctcttgttcatatccgtcaatcacctgctgcaggcgctcagacgcatagtgaagctcgagccgttcccgttcaagccgatgcttcatctcctgcaggcgttctttctcctcttcatgttccttgaggaatgcgatgcttgtttcaatgcgcttctcacattcttctgcctgcctgtccttctcatctatcgaagcctgccaggcgtcaatccggtttggcggaatatcaccgcagacttcgttgtactgattcaatcggctttctgacagcgattcaagctcttctaatgaatgtctgagacggtcggcttctttttcctcgtagcggattcgttcggcaagctgctcagcttgtctcaccgtctgctgatgcgcgctgatcagtcttgtgaccttctcttttaccgacagcatatcctgtttcatttgtttccattccaagcggacggcgctgaacgcttcatcaagcgggcgtccgctgatggaggaagcggcttccagctccggaacccgggcgctttgcagaaacgggcattcttcggtaaaacgccccgactgttcttctaatgcaaccttggctgtcagcacttcctgagaaagagccgccgcctcagaaagcagcgcttcaacctgctgcaactgttcctgtacagctgtatcaggcgagaatgtttcatgagcggaacgcgggcggtcatgctgcgtcgagccgcatacaggacaaggctttccttcgatcagtttttccgataattcttttgttaatgcagccgttctcgcttcctctgagcgcctgcggagatcggcttgcgttttgtcagcccgttcggctgcggctttcagtgaacgctccgtttcacagaccatatggtaaacggtttgaagcgtttgataagcgcgcgtaatgtcttcctcttccgttttcgctttcgctgtgagcgactcgctttctccgttcagcttctccatgtttttcagctgcgttgtcagattggcccgttctttcgtgatttgttcctgtgtctgctgaaagcccgccgccagctgtgctgcggtctggcattttttccgttcatcggcggtcacttgaactgctttcagctcttctttcagctcattctgcctgttttggccgcgggtcaggcggtctttcactgcggccagctgtttcgaggcggcttcgtattcttcctcttttttgctgtgttccgcatttgttttttccgcttcttttttcgcttcaagcagtttttgttcaatggctgaaagtctttgatacagctcttcttccttgacaagcttcggctcccgttcggccttatgggcccgccatgcttcataggcttcattttgccgggtaaatgaaacggtttccgcctctgatttccgtttggccagttcgtgttcctgttcggcgcgctgcttccggcggacggcttctgtgtagcggtctgcgtacggctcaagggcgagagctgtttcagcctctttaagacgctcagtcaaatccgtgatgtacgggcgtctttcctcaagctttttctcccggcgctcatattcatctctttctgtctgcaggttccaaatttcctggtgattctcaaaacgctcttttgcccggacccgtttcttctcagctgcttcaagccgttcgttcgcttcgtgaaactgctgttcagcctgcttcagcgcatcttctcctgcgtctccgaggccggattgttcggccagcatttcattttttttcgctgccgcttcctgcgcccgccgccgcaattttttgacaagcctgtccccgtactgttccagattaaacaggcgctggagcatatgtcttctttccgcgcctttaagcgacagaaactcggcaaactttccttgcggcagcacgacggctcttgtaaagtcgtcaatggtcaggccaagaagctcctctacctttttgttcacttcattcgctttatcggccagcaccgtttgttcatctttgatttcaatcaggcggcagagggcggtttttactttcgtttcatccgttctcttaaaaacgcgctcgaccttgtaggaaacccggtggccggattgaagcgcgaatgtaaatgagacggcgagctgatcttcggcatgattcaggatgccgtgcgtattatttgcggcgcgctccacttttccgtataaagcgagtgtcatggcatcaaggatcgacgattttccgcttccggtcggcccgaaaatcccgaacaccccggctcctgacagtccggcaaaatcaatggtctgttcctccctgaagctgtggagcccttttatcgttaacagaatcggcttcatgtcgcatcctcctcatcatctgctgacgcaagctctaaaaacagcttgaccatctcctcatccggcacgccgccgcccgtttgtttttcataaaacttcttaaatcgatcctcaattgatgtgtgtttcacttcaatccggtcatttccggtctctttttcttcaaaaaccggcctgatatggataaagccgggatgcgcctttctcagccgatgaatttcctcgagagaaagctgatccgtcaaatggatatcaagatcgatccaggcattccggtcacgcccttcatcgagccagccgtgaacttcgctcagcccctgcgctttccatttgacgagcggtttaccggaagacaggaaaatctcttcccacttcgcttctccgccgggcttcgcttctaccaccgtcaccgatttggcataaccggcttctgaaaagctgtatgcgagcggagagcctgaataacgggcagccgtcttggcgcgcttgatcgtttgcggacggtggagatggccgagagccacgtaagccgcatcagccggcaggctgtcagcggcgaccgtgtaagcgcccccgacttcaatcggacgctctgaatcggtttgatttcctcctgcgacataaatatggctcgccgcgactttcacggcatcatcccggcacagtccgcacatgcgggcaaacgcctctctgattttcacatcgtaatgatcgcgaagaagcttttcctcaaacgtatcagacagcacttcgtttaatctcgcttctgacggataggcaagcgcagctacggctaacagctcgtccgccgacggcacctcgatatgcacgggttctgtccgcggatagccgattaaatgaatgccgcgctcatttgttaacggagaagccgccgccagcctgtcgggattgtcatggtttccggcaatgacgacaaccggccgctttccgccgtcagaaagcgcggaaagactttcgtaatacaattgttcagcgagcgcaggcgggttgaccgtatcaaatacatcccccgccataatgaccgcatcaatattttcttccttgacaatggtattcagctcttccaatacctcggcctgctcgctcagccggcttctgccttccagcgttttgccgaggtgccagtcagctgtatgtaaaatgcgcataccgcattcacctcactttttgatagaaaaaaagatccgctccaaaaaggagcttcggatcttgttacagtgtaagaacgtgacctccatcgaagaaatagagcgcacgccctttcactttcgtttttgtaatttgttcaaccgcttttgtatacaattcgatttgtgtttcataccttttttgcagaatcggagccgcgccttcaaatccgttccggaatttcccctctatccgatctgttttatagtccagcaaatagagaccgtccgcagtttcgtagaggcagtcaataatcccttgcacgagcagcggttcaccggccgtttcggcatccttgtacacctcacccgccggaagcgccatactgaacggcacttcccgatcaatccgcagcgccccgagaaggtctttcccgatttcagtttcgaaaaactgaacaatttcttctatatcaatggcttcctgctgctcttctgtcagcagctctttttcgtaaagcatccggaccgtccgctccgcttcttcggcagtcggaacgtgcgtcagcggtatgtgctgcatcaccgtatgcatcgccgttcctttttcggcggctgtcagcccttttttcatcataaaaccgggacgcctgtataaaagcgtgtctcctgatggtttgatgagagagcggccgctgtattcatcctcgtattcttgctttctcttcagctcagaaactgactgcttcgttctgatagccgtcagctctcggtacggatattcccattcaagcagacggcgcgcctgatcatcaaatgaaaacgaatcaggaatcggctcgccctgctgaatcgctttgagacgtttgctcttttcttcagcacgttcttttggattctcttccagcaattcactttgctgcagcatccggatgtgaaaacgcgacggatcgcgcgcgatatcctcaggcgatgaaagccccggcgtcctgtgcgcttccatgtcacggtgacggatgagcgccggcccgataaagtccaaataagatgacgcctgatagcggtcgaattcagaaagaagccaatcagcccggtctgcttgcgcctgccatttggccagctgtttttcccggtttttgcaggagccgacgagaaacagcttttccttcgctctggtcagcgccacatacaatacacgcaattcttcggataagagctctctgcgcatctttttcttcatcgccacaagcggaagagtcggatagctgattctgagttccggatgaatgtacttcgtgccgaaaccgagctctttatcaagcaggtatgatttgttgagatccatcatattaaaacttctgccgagtccggcggtgaaaacgacgggaaattcaagtcctttgctgctgtggatcgtcatcagccgaacgacatcctcctgctcgctgagcgcccgggccgtccccagatcatcgccgcgctcctgcatccgttcaatgaaccgcaaaaagcggaataacccgcggaacgccgtcgcttcgtacgagcgcgcccggtcatacaagacgcgcagattggcctggcgctgctttccgccaggcatgccgcctgcatagtcaaaatatccggtatcgcggtatacttcccaaatcagctcagacaccgaatgattcgtcgaaaatgaccgccacttttgcagactgtcataaaaggttctcagtttttgatacagttcatcatgcctgtcagcgttcgctatatatgctttcagcgcttcataaaacggcgcttttttcttttcaaggcgtatcagcgcaagttcattttcgtcacatccgacgatgggcgagcgcagcacggaagcaagcggaatatcctgatacggattatcaatcaccttcaagactgaaagcgccgcagccacctccacggcttcaaagtaacccgacgtcaaattggcgtaaaccggaatgccctggtttttcagctcttccattaattgcggcgcccacggcatggagcgcagcaaaattacgatatcccggtactggatattccggtgtgtttttgttttgccgtcatagaccttaaacggagatgagacaagctttcggatctccccggctatcgctttcgcttcccagtgcacggtttcaaagtcttcggcatcctcggagctgtctgcgccatcagcgctgtcaatcagcagcagttccgtttttgccgcttcattcggcggatacgatgcgccgagcttcaatgccgcctgttcatcgtagtccacttcgccgatttttccgcccatcagctgcttaaacaagaaattcgtactgtccaaaatatcggagcggctgcggaaattttggttcagatcaattttctgccccgcgccttccccgctctctgtaaaccttttatatttcccgagaaacagcagcggctcagcaagtctgaaacggtagatcgattgtttgacgtcgcctaccataaacagatttcccgtctcttcattcccgcttttaacaagctgcaggatagactcctgcacaaggttcgtatcttgatattcatcaaccagaacttcatggaactggtcttgataataaacggccgcttcgctcggcacccgccggccttcttcatcaaccgcagttaaaatcgccaggcagtaatgttccaaatctgagaaatcaataattgatttttcttgtttcgccgcttcaaatcgttttccgtacgatatcacgagctgaacgagcgtttcgatgacaggcttcatatctgctaaactctttaagtgatcttgcggacttcttgtaaagtaatctgtctttaccttttcgatcagtttcttcgcgccgtttcgcaaatcggtcgcttcgtccaaaagcgctttgtcaaattcatcaccctttaccgccttcgcccgcttaaatgagactgcgggaacccgttcatacagcgcatcgaagtcatgccggcagctgatcagctcttctatctgctgaaggtcatccagaaaattatcagcgcgcggggccggcccgccgggcgcttttgtcagttcaagcgccttttcaagcttttgttttgccccgaagagcgccatttcagcatcttctctcacatattggtaaaacgcaagctcttccattttgctttcttccgtcacgtcatacaggcggacaaagctttgcagccacgcttccgggtcaggatgcgaccgggaatactcgtacacccgtttgacaaggtcttgaagatccagatcatgcctgtctgtcgtatatctgtccgcaagctcaaaaaacgcctgattcccttttgcgtattcatcttcaaacagctcatcaagcacttcgtctccgagcaattcgccttccgtctggtcagccatccgaaaaccggggtcaagatcaatcatataataatattttttaagcacttgcagacagaaagagtgaagcgtcgaaatgctcgcccgatttaatagagagagctgccgtctgatatgcagagatcccggatttttggcgagctctttttctaatgcttccgcgatccgatgcttcatctccgctgctgaggcgtttgtaaaggtcaccacaaggagcctgtcaacatcaaccggatcttcttccgcagttatctttctgatcatccgttccacaagcacggccgttttacctgatccggctgcggcagcgaccagaatatcgcggccggaagaaacgatggcgctccattggtcatccgtccatatgctgtctttcggtttaggaatttgcatcatcatccgcctcctttttcagccaatccagtatggtgccgtctttttccgctttcaggctgcggtattcattttccttaagcgactcatcaaactggcataccgacttaaacgcacagtacgtacaaggcgtcttatctttcagcttatacggggtaatggacacaagcccgtccgttatcgcttcgccagcctgttcaaatgtccgccgcacatggtctgtcagcagatgaaagtcctgttcgctgaccgcggctgagtcggatcttaaagacccgtcctttttcaaaccggcattgacgatatttgaacgcccttcctccaaagtcgtgtccatcagactgatcgcctcccggtcaccgaggagaaggcctttcattttaaatttcttaaaaatttcctgctcgatttcatcaagccccatcggcagactggcctgaatcatcggatcatggatatggaaatacaaaacgcctgccggtgtcgctttcataccgagccaatcttcggaatgtgtaatcgataagtcaaggtatgtgagcatttgcagagcgagcccgtaatacacctcagccagatcaagccctctgtcgcttgatttataatcaacgattctcagcagcaggccttttgagctttccgctttatccacgcggtcgatccgtccgacgagttccattgtacagccgtttttcagcgtgaaagtgagcgggggcagcggcccgcttccgccgaaaccgagttcaagaccgaccgggacgaaaccgctcgccttcgcatgctcgcttaatatgcctgaaacacgcgtgacgatcttctgcagtttttccttcacataaaagtgtctgtttgagctgagcagaatctctttttgcagctttggcgcaagccgttccaccgcttcataggagaaattccggcactgatctttcgtcagatctcgccattccagcttctgctcacgaagccggtctgaaatcagcttcaggctggagtgaaacagctggccgatatccggcgcgtccagcttgaaaaactgccgctcttttaattgaagcccgtgagatgcaaaatgagagaactggcaggcattaaacgcctccatccgtgagacgcttcctttaatatgctcgccgtaaagctggcgcgaaacaggccgttcaagacgcttcgcctcattgcggaaaaacaggcttgaaaacagctttttcgcacgccggtgatcagactctttcatcagcacattgtatgcgctccaccatacgtcactgatctcgtactctcttgtccacagcctgagctgacttgccgtatatgtctgagccacctgtttattgacgagatactgaagctgctcttcttcgcttacctgctcgggatcagccgctgacagcttttcctgatgatcgggaaacagctcgccaagcctgtttacaacgattgacggcaggagcgtttttccttccgcatcggcaatcgggtatgacacataaagacggtcagacggactcgacagcgccatatagatgagaaaatgctcatcaagcagccgctcacgccccgcggaagacagctccactccgaccgctttcagccactcccggtcatcatcagacagcacgccgttctcatccgggcgcgccggaagaacgccgtcattagccccgatgacgaatgtgcaggacgtgccgtacattcttgagagatccatattccctacaaatacttggtcaagagcaggcggaattaaagaaaaatgaagcgattccgttcccgtttcaagcatttgctggaacagcgccaatgatatttcatcttcacccatcatgccggcaaactcctcgagaagctggataacggcatcccacgcctggccgtgctgctgcgcttcgatcatgtttccggcctcttcggcccgctgccttttccggtccagcttcagtggaacatcggtatcttccaaaaagagataaagagcctccgccatgctttgaaccgttttcgcttttttcatccggttttgaagccggacgaggggcgcggctatccactctctcgtctcattcagcatgtgttccatctctatttcctgatccgtctgcgcgaaatcctcatcaagcgatacgaagcgcctgtatacaaaccgctcgccgcttgtccagcgctcccctttaatgccgtaggcaatacagtaattttcaagctgatcaacctgctctcttattttctgctccggctgatcaagcgggaataacagttcggttttcgcacagcggaacactgcttcatatctccagttccccttcacgacatcgaggcttgaacggatgaattcaataagcgggtgatgctgcatagaagcttttccgtcaataaaataaggaagcccgtaatcggcaaacacttccttcagcaaatctttataatcttccggctgacggatgagaatcgccatatctttgtaccggtatcctccgtcccggacaagcgattgaatttcccgggcaataccttcaagctcagctcttctgttttgcgcctgcatgacggtaaaagcttcctgtccgccggtatacgccgcggcgggacgcacatcgtactgtgactctatacaggcaagctccggtgcatgctgatgccgcttcgtgccatgcagttccttgcaggaaatatcagcattcaattcctttgccgtctgataaagcttatagtatgtgcttcccgtcattctgaacagatcgagctcatcaggtgcctgttccgccgaagggctgtccgccgtcagcgagaatgtgacatgttcagcatgcatgatcagctgctccagcacccttaattcctgcggcgtaaattgatagaatccgtcgacgtaaacacgggcgccttttacaacgtccgccaaaggaatctgctgagcgagcagcgtcaaatagtcctctgaatgcaaatagtgtccggcgaggcttctttccatctgctgatataaaatgcctaaatcatgaagtttttcagacagcatccgctctccgcgatattctgacgccgttccgctttccgccatgcggcggacgtcttcaggctcaatacagtaccgcttaaactctgtcagcatccgttccacctgctcagtgaacccggttttgtcactcgctttttgatacactttaaactcgtgcttatattcttcaatcagtttccttaaaagcatctgcacacccgtcgtcgtcacaaacgggcggttcatgcccccggtatgctgaagcacgcgccacgccaaacgcgaaaaactgaacacttgagcgcgtatcatgccgccgatatccggcgttttagcaagctcatattccattaaaaacgtcatttgatccgggactagaaaaatgatcggtttcccgaacggctcccggcgcagttcatcttgaatgctgtcgataatcagcctcgttttcccactccccgatctgcctactaaaaactcaacacccaaattaaaagacccctctctttttatctttctacattttatcgaaagttgacgaaaatgaccaatctcatctgctggtaaaaacgggatgactgttttaaaaaatttcgtttttgaccaaaataaagaaaaaaggactaatgatgatgtcagaatatcccgaagtaattgtacggacggctctgtcgttcagcattctgtttatcggcgcccgtatactcggaaaacaaaccatttcacagatgacgctttttgatttcattgcggccatctcgctcggcgccatcacagccaatctgtcgtttaatacaaaactgccgattcattttactgtcagtgcttacacgatttttgtggttatcatttatcttgtcgcatatctttctatgaaaaacagaactgccaggggtttctttgcgggcaaaccgaccattatcattcaaaacggaaaaatacttgagcataatatgaaaaagatgcgttataccctcgactacttgaaccagcagcttcgtgaaaatgatgtatttgacatttctcaggttcagactgccatcattgaaacaaacggcagcatgtcagtggaggtcaaaccggaatttgcgcccgttacaagacaggatctcggcatctttgccggacatgaaaagaactttgccgttgagctgattatggacggtcggctggtgatgaaaaatctggaagaaaatcacgtatcggaaaaatggctgagagaagaattggataagagaaacctcaaaccggaagacgtcgtatacgctgtgcgcggaagcaacggccggctttttgtcgacacatacgacgaccatattacatcgccgctggatcaagaataaaaatgacatccgcacatgtcacgggctgccgccgtataataccctataaacatccgggggtgagtccaatgcacgagaatttttttcattatacagccatctgcagtgacgattctgtgcttataaaggatctggtaaaatccataaacggtgaatacagcgctgtgatttgctactcaatattagccgaaaaagcgccgaccgcagaaatcagaagacgaatcgaacatatcagagaggaagaagtgcgccacatgcacgctttctcttcactgtatacgtcaattaccggaaaacagttgacgccgaaacagacggagcattgtccgcacacatacagagaaggactgagggcggcgttttatgatgagcagaaaacgaatgatttttatttgcaggcatccgatagagcggtgcatccggaagcgaagcggttatttgcccgcacggcatttgacgagcagcgtcatgccgtctggtttttatacgatatggcccactctcctttccaccatacagggggaacggtatcaaacgcgccgaacacaagctacaccgaggtaaataccggaaaataaacgttcaggcagatcacgctcccccgccgggagtcttcagaccgcagacaaaccccgttctttcaacatgagagaatggggtttacttttcgagccgtttatatactccctctaaacaatggataacttcttcattgtataatcagcaaaaaccctttataataaaataaaccaaccggtcggtttctaaggagccgaacctcatttggcggaaaggatctgtgtgaagtgacaaatacaaaaggcggtgccggaaagagcgaaaagacgaagaacaggctcgtatccgcttcgcgtgacttatttgcaaaaaaaggatattcagaaacatcgattcgggatattttagaggcggccgagatcagcaaaggcaatctatatcaccattttaaaggaaaagagtttctgtttcttcatatcatggaagaggatcaccgcgtgatgatcgagacgtggagggaaatggaagccgatctgaaagatgctgccgaaaagctgacgggctttgcggagctgctgagccggatgagcatcaattacccgcttatgagagcaagtgaagagttttatgcgagtgcgtttacgtcagaggaggtcgtaaagcggctcaacaaaattgatattgaatatgacgatgtgatgagagagatcttagaagagggaaatcaagacggcagctggtccattcctcatgtcgaatcaaaagtaaaaatcctgctatccgtcttctacggtttagatgtgttatataaaaacgataccattcagcaaagaatcgaattgcaaaaagaagccatctccgtgtttattcacgggtcgatcaacgctgataaacagaatgacagctgacaaaggagaaacaacatgcaaaaaccgatcagagaacaaaaggctgtactcatcatcttattaagcaacatatttattgcgtttttaggcatcggattgatcattcccgttatgccgctgtttatgaatgtgatgcacttgacgggcagcacaatgggataccttgtcgctgccttcgccgtcgcgcaattaattgcatcccccattgcgggaagatgggttgaccgcttcggcagaaaaatcatgattctcgccggactgtttttattcgcattatccgaactgaccttcgggttgggcacacatgtctccattttatatttcgcaagggtgctggggggcatcagtgccgcttttatcatgcccgccgttacagcgtatgtcgcagatattacgacagtgcaggaaagatcgaaggcgatgggctatgtatctgccgccatcagcacagggtttatcatcgggcccggcataggaggatttattgccgatcacggcgttcgtatgccgtttttctttgcggcgggaattgcatttatcgcagtgatttcctctgtctttatgctgaaagagccgttaactaaagaagaacgcgcaaagcagatggaaagcgccaaagaatcaaccttcttaaaagatttgaaaaagtcgattcatccaagctacttgatcgcctttatcatcgtttttgttttggcattcgggctgtcggcgtacgaaacggtattcagcttatttacaaaccataaattcggcttcacgccaaaggatatcgccattattattacgttcagctccattgtggcagtcctcattcaagtgctcgcgttcggcagacttgtcaacttcctcggggagaaaaaagtcattcagctttgtctgatcatcggcgctgtgctggctttcgtttctacggtgatgtcagggtttttgcccgtgctcgctgtcacctgcatcattttccttgcgtttgatttactgcgcccggcactgactacttatctatcgaagatcgcaggaaatcagcaggggtttgttgccggtatgaactcaacatacacgagtttgggcaccattttcggcccggctctgggcggtattttatttgatatgaatattcacttcccatttctgttcgcaggtgtggttttatttctcggtctgggattgacgcttgtgtggaaaggaaaagcgggcgaggtttcggagtagggtgcactcacccatctccggagctttttttgtgttttcgataagaaaaatgaatggattatgagaaataattcattatttatttatctcaaaatctatactatagtaatagtaaggttaacgagcttaacaatttaatatgaatgtttcaggaagaagggttttcattgaagaaagacaaacatctccttacagatatctggtttattctcatcagtgcggcaggggggtttcttctttcgcttacagggatgtcgatcgcctggatgctcggaacgcttgccgccggctgcatcctatccatgacgaggccccgctggctgttcatggcgcctgacagaagagggattcaccgcagatggcttgcggcgggacaaatgatcctcggcatcgaactcggccagaaactgaacctgtccgttctgtcggttttacgggagcattggcttccggtaggcttcatgctgattttctctatcgtgatggcgcttgtttccggatatgtgctctttcggttcagccggacggacatgatgacaagctttgtaggcacggcgccgggcggtttatccgccatgcccggtatcgcccaggaagtcggcgcaaacaccgcgattgtaagccttattcagctgacgcgcgtccttttggtcgtcatgacaataccgtttctcgttattttcttatttaccaaacaaaacggtgcggctcagacatcagccggagccgtttcagcaggagcttcacatccgggccttattcccgtcttgttaacggccggatttattttggctgcctggcttgcaagcaaaggcgcaaaacggctgaaatttcccgccccttggctgctcggcagcatgatcggcgttgctgctgcggaaatcggcgtgtccgccttggcgggcaaagacatgctggcctggtggccgccggaagcgaaccagctgtcacaaatttttctcggcgccacaatcggatcaaaaatgtacaaaagcatgttcaccggcgtgacgagagtgctgaccgtcgggtttatttcttccgtcggattaatcgccgccatgattctgagcgcggttgcggtttctaaattaacgggcatctccatgattacatctgttctcgccttttctcccggcgggatcgccgagatggcggcgacttcgatcaccctgcacgaagactcgactttcgtcgtcgcggttcaggtcatccggatcgttctcgtcatcgccatgcttccgcccttctatcggctgctgcaccacctttctcagctgaaacgggcacacggcgaaagaggccgggcagaaagaggaacatgatccgaataaaaaaacacgcatccatatgcgtgttttttatttgaacagctcaccgccgccatttacagaccgccagtttgctgaaagatcacggaacagccgttcagcaaataacagttcttcatctgtatagcggtctaaaaacgccaagagccgctgttttatcaattcatgatattcatgatgaagggaatgcagctctttcccggcaggagtcagccggaaatagacttcttttttattgtcgctcagccgggttctgcgcagaaagccggcttccaaaaacttcgcgcagcttctcgacacggtcggctttgtcgtcttcattttttccgctattgacgtgacattgatcggttcatgatctccgatacacgacaaaatgtgaatttccgtcaaggtcaattgtaattttttcccgtttccttcacggagttcatccatccgtccggccaacgacgccctgatatcctcctggcacctctcctgctcgtgaaaaatatctgtcagcccttcaagaatcatgtgttttgcatggtctggctgtcttctgtccaactgctgagtcacccttccgtattgattgtttcttttactataacgttttgttacacaagaaacaatcacacaggcgcataaaaaggttatcagatgaataatccccatctctccaaaccggccagaacggcttcttccgcttcacgtcccgagccgccggctgcccatgccgcatggccgtccggccggattaaaacggtgtggacgtcattccaatcggcacgtgtttcagcaagctccgccctgactgctgccacactgtccgtatcaataccggcgggaatgctccctcttaatgacagaagcacaaagccgcccttgcggagaaaatcatacagccgggccggccgcccgtcatgaagggtcagttcgatatccggcaggcgttttccgttcagcgtatgcggcggcagctccgcatccggttcataatgcagatcaagcgcggatacttttcccgccaataaacggttggactcctgaaaatccagcaaagcggtcatcgtttctcttaatgccatccccgactcggtaaaatccatgagctttatctgcgttttgatattgtgcagcacttcttttcctgtgctgtgcctttcctgatgatagctgtccagaagatgaggcgccgcttttcccttcatttgcgccgccagcttccagcctagattgacggcatcctgaagccccgtattcaggccttggccgcctgcgggaaaatgaatgtgcgccgcatccccggctacaaaaatccggccggagcggtactgctcagcctgacgctcggcattgccgaaccgcgacatccataccggatcactcaatccgaaatcagtgccgcatatccgccgcaggtcttctttcagctcatcttcggtgacccgctcttccttccgcttttgcgggacgtgcggagaaacgatgaggacgcggaaaagtccgtccgtaagagggataatcacaaccgatccctccagccggcacgttgaaaaaaaggaagattcgggcggatgtttcaaagcggcatcacaaagggttcctgttaagtcggcatcagtgcccgaaaaagcgatgcccgcctgtttccggacaatgctccccgctccgtctgtacccgcggcatataagctgtgaagagtgccgattccgctttcgtcccggaacaccgtctccactccgtcatccgtctgggtgacagccaccgcttccgccccgcggatgatatttgcgccgagacttgatgcatactcctccaacatccgctccgtttctgcctgaggaagcattaacgaataattctgcttcgtatccagccgagaaaaatccagccgtgtatccagcatggaaaaatggccggaagacaccttcgtcccttgatccacaaagcgttccaatatgcctctcatggcaaaaagctcaagtgtgcgcggatgcatgataagcgctttggaatatggcaccgtcttcttcaatcgttcaatgacagtcgttttcactccggccagcgccagttctgatgcaagcataagcccgaccggacctcccccgataatggcaacctgtgttttcatctcatcagccctctttcctttttttgttacacacgtaacaaaactactaaaaaataaacgcctccttttttgtttcgtgcgtaacaattttcattatagtctttcctccgctttttgacaatcatttccgaaaaaaagacgccgttcacttggcgtctgattcactgatgactccgacaatgtctttatccttaatcggaccgaaatgacggctgtcgaggctgtatatgcggttgtcgccaataacaaagtattgtcccttcggtatgcttttgcgcccggtcgtttccttcagcgtataatcaccggtcacatggctcccggcggacaatgatgactttaacggttttaaaaacggttccgccacccgttttccattcacatacagctgatcctccctgtatgcgattgactcgccggggagcccgatgacacgtttgatcagcactttgcggtgcgggcctttaaacagaacaatatcgaaacggcggatcgttttgtaacgatgggaaaacttgttgaccatcagctcatttccttgtttaaaggtcggattcatgctgattccttcgactttataatcaataaaaatggcattctttaattgtatggccaaaacaacgataagcacgccggctataaaccaaaatcgttttttcaagattcctgtctccctccgtctttctcatgctgactgattctcgtctgtaaacgccgttcgatatgctttccggcataccacagcaccgcgatcaccattatggcgcccgccatcctgaaaggctgtgtaatgagtgcgtgaagatcatacccgataaaactgatcataaagatcataaccattttccccatcgcggctgctgatataaactgcagcgctcccacccgtgacagaccggcaacgatatgaaccgcagcggacggcgtaaaggggaagcaaagtaaaataaacagcggaccgaaaccgtgccgctcaacccagagcatcatccgccttatggtctgatgcctgcggatgaaaccgaaggctcttttctgtccgaaacggcggacggtataaaacatcagcatcgatcctgacgcagacccgagccatgacagaaaaaaaccttcccacaaaccaaatgcattcgtattcgccaccacaaatacaacgagcggcaaaaacggaagaaacgcttcaataaaaggcagtacagccgcagccgccgggccgaaagctctatagctttggaaccattccgtcagctgttcctcagtcaaatatgataaaaattgctccaacgtttatactccttaacgagtttgtctatccttattctacacattatctccaaaaaacgaaaatgtttacgagattttccgtcttgaaatatcgtgtaagcgagtataaaataagaacaaatgttctcttttttaagaaagaaggagtatttatgcctgacattcggagcggcacccgcgatctcatcgaaaaagggctgtttctgcccatggcggctgccatcctgaaccgggacctcgaagcgcttgattcgtgcccgttcaaattaaaacaaccctataaacagcttatcagctgctctttaaaattagcacaaaaggatttgagtgatgttcgaaaagagttaagaaagcgtaaaattaaaatatacgaagcggaaagagacgaagcatttacgctttatatatgcaccattaacggctatgaagaaaaacaccgttatttcaacccgagaatacgggaacaggtaaccgccttattggaatattacctgtctcttgcgaccatttaaaaagcagccgggactgcttttcctttttaaaaaataaaattcagactattcacactatacattcgacatgattttctttataatcgggacacgctgttttcaatgaaaaggaggaatgttatgaaactgattcatgttctcgccgccctgccctttttcggaattctcgccggcattccatttgcaaaccgggtgacgccttatgttttcggaatgcctttcattctcgcatatgtcgtcatctgggcggtgctgacttccgttctgatggccgccgtttacaaattggacaaagaaaacaaggcgggtgagacggaatgaatgcagcatttcccgtaatggccgccgtgctcctgttttgtgtatatctcggaatccgggcccgaaaaggaaaacatatggaccttgaacaatggacggtgggcggacgcggcttcggcacgatgtttgtctttttattaatggcgggagaaatatacacgaccttcacattcctcggcggaagcggatgggcttacggaaaaggaggcccggccttttatattatcgcgtacggctgccttgcctacattttgtcatattggcttctgccagccgtgtggacttacgccaaacaacacaaactgatgtcgcaatcagatttttttatttcaaaatacaacagcccgctcctcggcattctcgtatcgctcgtcggcatcgcatccctcatcccctatctcgttctgcagctgaaagggctcggattaattgtttcagcaacgtcatacggacagattccgccctccgccgctgtctggatcggcgctgtctccatcacaatttatgtgatgatttcaggaatccacggttcagcgtggatatccgtcgtcaaagatatcatgattttaggcatcgtcctgtatttaggtatttatctgcccattcattattacggcgggtttacggagatgttcaaacaaattgacgccgcaaaacccggttttctcacgctgccggaaaccggacagagcgtttcctggttcagctcaacggttttgctgaccgccctcggcttttatatgtggcctcatacctttgccgcttcctattcggcggagcatccgcgggtgtttcggaaaaatgcgattatcatgcctctttatcagctcgtcctgctgtttgtcatctttaccggatttgcggcgattctgcaggtgcccggtttaaaaggggcggacacggatctcgcgttattaaagctgtctgtgaaaacctttgatccctggtttgtcgggctgatcggatcggcgggcattctgacggcgcttgtacccggttcaatgatattaatggcctcaagcacgctgttcgccaaaaatgtgtacaaagccattctgcccggcacgactgacgaaaaagtctcgcggctcgcaaaatacgccgtacccgttatcgcgctgatttccgtatattttacgctgaaaggcggaaataccatcgtcaccttgcttttaatgggctacagccttgtcacccagcttttccccgccctcttattcagcctgccgaagcggcgtttcatcacaagccacggcgcttttgccggcataacggccggggtcggaacggtggccttcattacgctgaccgaatcaaccgtcggaaccctctttccgtttcttccgcagatcgttaaggatatgaatacaggcatcatcgcgctggttctgaacattgccgtcatgtttgcagtcagcgccgcagtcagaaaaaaacaaatcagcgcagccgaaaaggcggcttaatgataaaatagcggtaagacacatgaagggggaaagccgcatgatcatgacaacgaccgaaaccgtcgccggaaaacagattacggaagtaaaaggcttagtgacaagcagtatcgtccagtcccgtcacatcggaaaagacttgcttgcaggcttaaaatctgtcgtcggcggcgaattaaaaagctataccgaaatgctggaagactccaaaaaagcggtgaaagagcggctgatcagagaggcggagcagctcggagcgaacgccatcgtcggcctgcggttcgaactgaccgcaggacagaacacatccgaattaatcggatacggaaccgccgtcaccgccgaatccatttaaaaaaacaagcctctttaaagaggcttgtttttttatttctcacatgcgatatagtctttatcccggtcaagtcttttatttgcattataaagcgcttttgatacatacggcttgtactttgttctgccgcccttgtttttcactttcgacgatttggccacgccgcccttatacaccttattcagcgccttgcagttttgatacgtttttacctttgttttcgcttctgccgtctgccccgctccgtatgaacaaccgaacaccaggccgaaagacaaaagcacagctgccgtctttttcatttctatcctatcccctttcctgaatcatgctgtattgctgaacatatcatagttcaaataatctccatttacaagataaataggaaaatagttttaatttatgtccgcccgtatatcttttatggaatttttcccaaaaccttttataatatgaattgatagcgctatctgactatgatgataggaggagaaatgatgatgaaaaaagggcttgttgcgggtgttctcactacagccgttctattcggcgcatgtacggcggatattccgggggtgatcagtcccaatacggcggaagcggcgtcccagctcagtaaaggaatcggcggaagggcctatctgaacagcacgggctcagttctcgtcacgaaaattcagcttccaagctcgattcaggtgtcaaatgggacagcctatatttactcaggatttaccggaggcacagaggctgatatcgggcttcagtacagtgacacctatcatgtatggaaaccgatcatgaaagtcggttcaaagggacaaggccaggtccggtatctggaaggagaaagccaattcacttatacgaaaggcttccggcccggcagcaccgtacagctgaccatttacaaaaatctgaacggcaacacccgcgccacatattggggcacgaataatgacggatacaccggccgcatcatctcagaactcgcccaaacaaatgtaggctctgtctcaaaatggaaagcgctcgccaccgtcgcggtcacatcagaggatcagcgcccttacatcaaatcaaacttctcaacagcctttacgaacatcacgatcgacaataaagcagtcacccctgtgattgatacacaggattttgccaaattgacagtgtcaggcagcagcgtcagcatgtctgtcgtcaaataaagaatgttgaacgcacgatttcagccatcgtgcgtttcgtgagggtctgccggatacgcaaatcccttatttttcggaatacgtttaataaaaaacagccctcctcagggttgtttttttaacatttctttcgttatttccgccaaaacgctgagcagtccgccttatcctgaacattgaattgaatcatgctttcaagcagctcataatgcaccggttcagtccattgaattctgaacaaacgggaagtagcgctgtagccggcacgggcaatgtcgtcggcaaaatgcgcaattccagcttcttcgggagaaacacttacatgatgctttgctgccgcaaagccgataataaacgtgccgtgatcggtaaacatcggcgtgttccacttgatctgcggtgttaaacccgggaattgctcagccgtccacgacaggatttcctccattcgcagacgatgatcagggctgtcgatacttgataaatagtctttgaaaacgtccatgtcttcctccttcaacatcacgtccgctagcgccaaaaccccggattttcagctttttccttgatgttaaattcgatgatcttcttaagcagatcatagtgcaccggatcagtccaccgaattctgaacaggcgtgaagaagcgctgtacccggcttgggcgatgtcatcggcaaaatgctccatcgtctctttttcaggtaaaatgctcaaatgattttttgccgcggcaaacataatgatataggtgccgtgatcggtaaatgtcggtttgttccacttgatctgtgcttctaagttcggaaattggtcagccgtccacgacaaaatttcctctgctttgagacggtgatccgggttatcgattcctgatatatattttgcaaacacatccatgcccatctctcctaaaatgaaatatcattactctttacatcatcatagccaacagacggacacgatacaactctatccgggcatgtaaatcgaaaaaagcccttcctaaaaggaaagggcccgtcccttcacatcacagctttctctaatatctctcccccagctcccgcaaaataaagtcgtagatcattcttgtccgctcttctttcggatacagcatgaattcctgccgcttcgggatatgactgcccatcctgtcctgaaaagtggttctgagataggcggttctgtaaacctgattttcaaaagaatgataggatacttccagttccatcgttttgccgtttgagaacgtgaccgctgtgtcatcaaatgccgtcggttgaaaatctttaacgtgcacatgcgatatccagccgcattgaggccttgcagaagaaagtgtagggaataaaaagatgtgatttgaagggtccaccataatcggcggcttgtgagaaattttaatcgcttcatatgttcccgcttttctcccggcatagctggagccaaagtagcggcagcttctgtcgatgatgtgaatcggcttcatgctgacatacagaatgcagtctttttcaatgaccttcgaccccattttaccgtctatttcctcaggcaaaacagcgatggttgaacgatttacttcatagctttctaagggtgcgtgtgttttctggcacatgatgtgcagcctccaatccttttcttgaaaatttatactaataatctatcatctgtcattgaaaaacgacaggttttttttgaatatagctaaaaatcaccttttaaagatgtaatttagtcttaaattactatttaaatattatttttctttttcatttcacctcatttatacaacgatcattttcgttttttcgtcaatttgcaggatatgtcgatatatttccaagtattagttgtctaaagattataaaaattaattgatttttccggccgttatccatatactataaaaaaggcattggggggattctttatgaaagagaaaaagtcgtacactgagctcatgaagtcccgcaacacgcaaaaagcaaacgaattcgatgtgacaatggccgatatttacattcaaatggtgcttgatgaatccttgtataaacgccggatcgccatactgacaatgcagattaataaggcgcttgatgataaaaataaagaagcgttcctcacgctttcaaaagaatatgcagcactcaaacagagtgaataagccaatccatatggattggctttttttacattatccgtttacgatggtgccgccgttcacatgaatcgtctgacccgtgacataggtagaatcatcgcttgctaagtacaaatagctcggcgccacttcaacaggctctcccgggcgctgcatcggcacgtctgagccgaagacttccacttccttcgccgagaagctcgccgggatcagcggcgtccagatcggccccggcgccactgcgtttaccctgatgccctgagtgacaagagattgggaaagagatcttgtaaacgtgacgatcgccccttttgtcgctgaatagtcaatcaatgttttgtggcctttataggcggtaatggaagccgtattaatgattgaacttccttttttcaggtgagggagcgcggctttcgttaagtaaaacattgaaaaaatattcgtctgaaacgttctgatgagctggtggctcgtgattttctcaatccccggctgcacgtgctgctcacccgcgttgttgaccaggatgtcaatggaaggaaaggcttggcccgcctggcggatgacatcgttgcaaaaagcttcgtcgccgacatcccctgcgatcagcagacacttcgccccctctttttctacatattgcttcgtctcttcggcatcctgatgctcatcaaagtaaacgatgaccacattagcgccttccttcgcgaataaaacggatacggcgcggccgatcccgctgtctccgcccgtgatgatcgccgttttcccttcaagttttttcgccgctttcggtttgtcaaaaacggggcgcgggtccattacatattcaaagcccggctgccggttttgatgctgcggcggcaaggttttcttcttctgattagccattttgatcactcctttacattaattactatattatgagtaatttgagcatcttatacgaatttcatgtatgaatagagtcttattggaaaaattaagaatatacaacagaggaggtaaatctgaattgactactttttcaaacgaggaaccggcttcctattggaaagcaacagctgacattccttcctttcccgccctcactgaagatacggaatgtgacgttgcggttatcggcggaggaattacgggcctgacaacggcatacgaactgacgaaaagaggtttccgtgtcgctgtcattgaagcagaccggattttaaacgggacgaccgcgggaacgaccgcaaaaatcaccgcccagcatgatttcatctatgccgatcttattcagcagatcggcctgaccagcgcaaggctgtatttcgaagcccatctccgcgccatggaagacatgaagcagattatgcaggacctttcgattgaatgcagactggctgaacaagacgcatatctttacaccaatacagaatcaggcgccaaaaaaatccgcagcgagcaggaagcttataccaagctcggcattgaacacgagcttgtgaaagaacttcccgtccccgttgattgcaggctcggtctcgccatgaagaatcaggcgcaattccatccgcttttatatggtgcggcgctcgtcaaagagatcgttaaaaacggggcgcggatttttgaacagacggctgcgatcgacataaaaaaagaaccgcagccggaagtggtcacgaaaaacagacacggcatcaagtgcagctacattgtctgctcttcccactttcctttttatgacggaggggggctttacgccgccagaatgtatgccagcagatcctacgtactcgcggtaaaaccgaaacaagcgtatccggacgggatgtatctcagcatagacaagccgtccagatcactgcgatacaccgatttgaacggtgaaaaactggttcttgtcggcggcgaaagccacaaaacaggccaaggaaaagaaatgtccgagcattacgaagcgctgaaacaatttgcggaaaacacaatcggggttgaaagcatcccatatcattggtctgcacaagaccttgtcaccatagacaaaattccgttcatcggtcccatctcaggcgatgaagaacatattttggcggcgaccggttttaaaaaatggggcatgacaagctcagcgctcgcggcgaagcttttgtctgatcatattcaaaacaaaaagaacccgttctccggcctgtttattccgtcacgcttccacgcagatccgggactgaaaaaactgatttcttataatgccgacgtggccaaacaccttatctcgggcaaacttgagaggccgggcgcttcacctgagactcttcggcccggggagggaaaaatcgtaacggtaaacggcaaacgggccggcgcctataaagatgaaaaaggctgtctgcatcttgtcgatacgacatgcacccatttgggctgtgaggtcgaatggaatgatggcgaacggacgtgggactgtccttgtcacgggtcccggttcacacctgacggcggggttgccgaaggtcccgccatcaagccgctgaagcgcctcagccaagattgactaaaccattctgtacgaatggttttatttttttctgcattaaaatatttttatcagattccttcattcaagttccttccataccgataaaaagaaaaagagaatatctgggggaacttatattgttatttaaaaaagaccgcaaaaaagaaacagcttatttttcagaagccgatggaaaaaaacgcatcgcgctttcaaatcaatatgcagatgtccaaaaacagctgaaaatggtcaggctcggaaacgaagaacttcatgtgcttgaagagctgcagccgttaattaaagaacatatctcaacaatcgtcgattccttttaccgaaatctagatcacgaaaaatcattaatgacgatcattaacgaccacagcacggtcgagcgcctgaaaaaaacattacggcgtcatatccatgagatgtttgccggcacgattgatgatgaattcattgaaaaaagacagcgcatcgcttccatccacttgcggatcggccttgaaccgaaatggtatatgggagcgtttcaggatctgcttctgtcgatgatgaacatatatgaagcagcaatcccggatttgcatgagcttttaaaagcgatcaaagcgacgacgaaaatattgaatcttgaacagcagctcgtccttgaagcattccagagcgaatataactgccagcgtgacgaacaagaggaaaagaaagcccgtcttcatcaaaaaatccaggaaacatccggatcactcgctgatttgttttcagaaacgagcagagccgtgcaggagctggtcgacaaatccgagggcatttccgaggcgtcaaaagccggcaccgtcacttccgtacatgtcgaagaaaaatcaatcggcgggaaaaaagaacttgaaagccagcagaagcagatgaataaaatcgacgccagccttctgcagattgaagaagaaatggacaagctgaatgacatcgcccagcagatcgaaaaaatcttcggcatcgtgacggggatcgccgagcaaacgaatctcctgtcactcaacgcctcaatagaatctgcgagagccggtgagcacggcaaagggttcgccgttgtcgcgacggaggtaagaaagctttcagaggatacgaaaaaaaccgtttccaccgtatcagagctcgtgaacaataccaatacacaaatcgacatcgtgtccaaacatattaaagatgtaaacggacttgtaagtgaaacgaaagaaaaaatggcgcagatcaaccgtctgtttgatgacatcgtccaaagcatgaaaacgagcaaagaccagacaggcaaaatcgacgttgatttgcaggcctttctcggcggtcttcaagaagtcagccgcgccgtatcccacgttgcatcatccgttgattcacttgttatccttacagaagaataaagataaaccgaccggcctttttcataaagggccggtctttttaatgttaactcaaaatataatagagttgacatatataaagactcgctttattgtataaacatattttgataagctggaggaatacataatgaaattgacagaaatgatgcatattgccgtgtttaccgccattatgggacttttgggactgctcccgccgcttttcttatcctttacgccggttccgattacgctccagacgatcggtgtgctcttatcgggaagcatcctaaaaccgaaagcggcgtttttaagccaattgctgtttttgctgattgtggcatgcggagcgcctctcctttcaggcggcagaggcgggttcggggtttttttcgggccgagcgccggatatctcatcgcatatccgctggcggcattactgctgagcctcagcatccaaggccttcgctcagctgctgtcccccatttgtttatcagacagttcttgttcggcgtgctgtttttgtatgtcatcggcattcccgttcaggcttttataatgcacattgatatcttaactgccgtaaagctcagcctcatctatgtgcccggagatctgcttaaagcggccgcagcctcattcgcagccgtaagaatcagaaaaactcttcaagctagccggcttttgccgacgaaaggaagctgattttagtcatcatgattacatcatcatattcagatacagccggacaagcgccggaacagatcgcaattcagacagaaacagaacagatcacctatcaaacttggaacaggctggtaaaccaaaccgcaaactggcttggcagcctttcaggtaagccggaaaacattgcaatattactgccgaacggcatcccttttttacaacttttcgcaggggcggcgcatgccggctgcacggcggttccgttagatccccgctcggcagcggcggaactcgcggatcagctgaacatcagcaaaaccgacctcgtcatctgtgaccgccggctgagcggcagactggacggcgtcaaaacgcctgtcatcctgtgggatgaatgcaggcctttgatcgaggcggaaaaaacggaaggcgctttgatcaaaaacgccggcctgcccttttataccggattcacctcgggatcgaccggtaagccgaaagccttcacccgctctcaccgttcgtggctggagagcttttcttgtacgaaacgtgaattcggcatttcccctgatgacaaagtgctggtaccgggcacacttcgatcgtcacactttttatacggcgccgtcagcactttgtttatcggcggaaccgtcatccttcaaagaaaattcaatccggccggaatgaaagaccggctcagacaagctgacgttctatataccgttccgacaatgacagacgccctgctctcactagaggcgtttcccgatacaccgctcaaggtgatttcttccggtgcagactggcccgcttcatcaaaacaagcgctgtcagagcgctatccccatttgcggctgtacgatttttacggaacgtctgagctgagtttcgtggcgttcttatcgcctgaagacagcgcccggaagcctgacgcggcgggccgtccgtttgaaaatgttacaatcgaaatccgccgccccggaggagaacgctgcatgccgggcgaaacggggaagattttcgtgaacagcccgatgaaattttccggatacatcaacggcgcaaaacctgatgattccggctggatgacggttgatgacatgggatatatcgatcatgaaggctatctttatatcgaaggacgtgaaaacgggatgatcgtatcaggcggcctgaatgtattcccggaagagatagaacgtgtgctcaaccgctgtccgggcgtcagaaaagcggccgtcatcggcattcctgatgattattggggcagcatcgccgttgcggtgatcgacggacatgcaaatgtaaaggaactgaagaaacagtgccgcgagcagctggcagcatataaaatcccgaaaaaatggctgttt

SEQ ID NO: 41 - DNA, 13719 bp, Bacillus amyloliquefaciens
ctgaaacgtttcaggcgcgatggtcttatccagcgtttcgcttaacacatggatgttttcatgagaagacagctcgaaaagcttattgtaatactccgtctcatcataaggagtgcccaaaatccggacggcaagccgggtaaacgccagcccgttttcccgctcgtaaccgggacgttccggcagcggccgcatcagaaacgtttcccagtcatcgttttccggctcggcctttcggatcaccaattcttcctgcctcatcatcttcctcctttctcttcatgattatcggtacaaaaaaggaaggaaatgaactctccctccttttttgttttattcttctttagatgcagccgtttgctcctgaacctgcttttgtttgttgaaatagtggataataaacgttaccacaaacgcagcgatgatgattccgaagaacacaacgtgcggcatttcataatcaaaggcgctcgccgccattttcacggcgataatcccgatcagcacgaaagccgtgttttcaagctcagggattttatcaattaaaacaaggaatacttttgcgactgtacgcatcatgagaatgccaagcataccgccgatcaagagcacccacactttttccgataccgcaaacgcggccaaaatgctgtcaacagagaaggccagatccattaactcaactgaaacgacagtggcccagaaaattccgaacgtacggaccatccatgaatttttcttcatgccttccgtatcgtcatcaccttctccgatccagaaatgcttaatgacgagccaagccaggtacagcgcgccaagcactttgatccaccagaacttaatgagcagcattccgatcccgataaagataaaacggaaaatatatgccccgaacaatccgtatgttaatgctttcttccgctgtttttcaggcagatgccttaccataaccgcaagcactaacgcattgtcggccgacagcagcccttccagcagaaccaaggaaccgatcagcccccatgatacagggtcagtcagcacctcaccccacattttccaatcaaaaaaggaagcgtaggtcgacataatatgatgtagaaaatccaagttttttcctcctatttagtaaaacggtaatttcctgcttacacctgcaagccgtaattccggcaaagtgatgccagaccgccggaaaacccgctgccgatggcgttaaacttccactcagccccatggcggtaaagctcacaaacgacaaccgccgtttcaatcgagaagtcttcccctaaatcgaaacgaagcagttcattctggctgttttcatcgacgacgcgcacgaacgcgttagacacttgtccgaaattttggccgcgcgcttccgcatcatgaatcgtgacggtgatgccgatcttttcaatatttgcgggtatttttgagaagtcgacgataatttgttcatcgtctccctcgccctcgcccgtccggttgtctcccgtatggatgacgcccccgcttgggtgttccaggttattgtagaaaacaaaatcaagatcatttacacagttgtcatgggcatcgacaagaaaagccgacgcgtcaaggtcaaagtcatgccctccggagtacttgttcgtatcccagcctaagccgatcaccgcttttgtaaggccggggttcgtttttgtcagatcaacacgctgtcctttcgataattgaatagccatgtgccgtcctctcccttctgtgtttgatatggttcagccgatttgcaggccgtaatctgtcgcaatacgggccagtccgccttggtagcctgagccgatcgcggaaaatttccattcgccgttatgtctgtaaagctcccctgcgataatggctgtttcaattgagaaatcttcagccagatcgtagcggatcagctcttcatttgtctcttcattgacaatacgcacgaacgcgttggaaacttgtccgaagttttggccgcgcgcttccgcttcatgaatcgtgatgacgaatgaaattttgtcaatagccgcaggcaccgcgctcaggttgactcttacgctttcgtcatcgccctcgccctggcctgtcaggttgtcgcctgaatgtgcgacagagccgtttccgccttcaagctgattatagaaaatgaaatcatcgggcgacgcgcatcttcctgcttcatttagtagaaagacgctggaatctaaatcaaaatcatgtccgccgtcgtatttgtttgtatcccagccaaggccgacaacgactttagaaagacccggatttgttttcgtcaaatctactttttgtccttttgccaatgaaattgccatgtgagcactctcctttttatcgtttaggcgtatcggttaacgatatcgccgatttttgtatcgtttgtgccttctcctactgcggcgaatttccactcgccgtcctcgcggtagatttcagccgcgatcaggctcgttctgcctgaatagttatctcttaaattgtaagtcaccagttcttcgcgattagcctgatcaacgacgcggatgaacgcgttttgaatcatgccgaagtcctgttttcgtctgacgcagtcgtaaatattgacgacaaacacaagtttattaatctgagcgggcactttcgccaaatcgatgagaatttgttcatcatcgccgtcgccttcacccgtcaggttgtcacccgtatgtacgacaccgccgcaccggcttttcagattgccgaaatagatgacgtttttgctgtctgtcattttatcattttcaagcatcagtacggaagcgtcacagtcgatattggcaccgcctccgccgaacagctttccgaaaaagcccccggatgatacagggtcccagccgagtccgaccagcagttttgacaggccggcttttccttttgttaaatcaatccgctgtcctttttgtaaagagatcgccatatgattcactcctattctgtaagggtgccgctaagcacgccgcaagtgcgcatttttactaaattccgggacaagaatcccggtgtttattaagatatacgtcttttattatatcaaagtttcataaaacataagaatttttggcgaaaatcggcgaaaaatcacttcctatattctccttcgttccggagagaatagaaaaaacaaagaaattgacgaggactgaacatttttcctatccttgtatcaatacatgtcaggaaaggggcagacgagtgattgatttaagcatacttgatcaggcgccagtatccaaaggaaacgggccgcacgagacgctccgccattccgcggagctcgcccgcctcagcgaaggttggggctataagcggtactggtttgccgagcatcacggcacaagagggctcgcaagcgtttcgccggaaattatgatcgctcataccgccgcagctacaacatccatccgtgtcggatcaggcggcgtgctgctgccgcagtacagcccctataaagtcgcggaaactttccgtcagcttgaggcgctgcacccgaaccggattgaccttggggtcggacgctcaccgggcggcacaacgaaaatccggctcgccctcacagacggggtaaagaaaagcatgaccgagtttaacaggcagcttcaggatttatcatcctttctgacagattcagttccctcggaccatgcttatgcaggaataaaaacagcgcctttgattgaaacagccccgcagctttgggtgctcggcctcggggaaaacagcgccagacgcgccgctcttcaaggtgctggctatgtcttcggccatttcattaatccggaacgcggggaaaaagcttttcagatctatcgggaccatttccgggcctccgcccacttttccgctcccgcctcgctctgtgccattttcgtcatatgcgcggctacggatgagaaagcggaagaactcgccttaagccaggatttatggcttcttcgtgtcggaaaaggcgccgacagccgcgtgccgagtgtggaagaagcgaaggcttatccgtattcgccggaggaccgtaaacagatagaagaaaacaggaagcggatggtgatcggctctcctgccgcagtgaaacgccgtctgcttgaactttccgagcggtatcagacaaaagagatgatggtgctgtgcaacgtctttgatttcgaagcaaaaaaagagtcatatgagcgtcttgctgatatatttctgtaaaaaaaaagccgtcaaacggagcagcagatgagactgctgcaccgcttaacggcggttttttcgttcttttccttttttaaacgcattccaaatcccctgcagcgtaaacccgagcagaagcagaatgattaacagtaaagtgattgacggccccggaggcgttccgagctggtacgaagacgtcagccccatgaacacactgaaaagagaaataataatggctgccgcaaacacccatttaaaccctttggcgatacggattgcaaaagccgcgggcagtacgaggagcgcggaaacgagcagcacgccgataatcggaataatgaccgaaatcgccagccccgtcacgatgctgaatgacattgacagcaggtttgtgttaatgcctgatgtcttcgccgtcgcctcgtcaaaggtaagaagatagagcggtctgtttaatataatgaaataaagcagaatcagcagggtaatgcctccgataatatagacctgctgctggctgaccgtgacaagcgatccaaataaatattgatcgatgctcattgacgcgccgcctttagacaggctgatcagaaacatcgcaaacgacagcccggccgccattaagattgcgatagatacctctgaatatgtacggtatgcccgccgcatgtattcaattcctatcgctccgatcgtgacgacaacgatgctcgccgccgtaatattggtactgagaaaaaaaccgatggccacgcccgacaatgaaatatgagacagcgtatccgccatcagcgcctgtcttctcagcacgagatatacgcctaatatcggcgccataattccgatcatgcttcccgctagaaaagctcgtcgcatgaattccaagtcaaacatttccatccgcctttttcccccctctcaagccgtatgactttatccagatactgctgtacttcgttttgttcgtgtgtcaccatgacgacggtccggttgtggtttttcacctgatggtgcataaattcgtagaaaccctgtctgctttcataatcaaccgcggttgtcggctcatcaagcatcagcagatccggattgctcgcaagcattctcgcaatgcagattttctgcttctgtccgccggataaatcgccgattttccgatggcggaaatcccacatttccaccatcttcagcgcgttttccacctcgtggtgatccgtttcgttcaatcgtttaaaccattttcctttcgtataacggcctgattgcacaagctccagaaccgtgcttgggaatcctgcgttaaatgaagaaatctgctgcggaacatagccgattgtcaggcgttttccggctgcgttttttttactgatctcggccgttccttcccaaggtctgagcatgccgagcatgactttcatcagcgtcgattttgacgcgccgttcggtcctgtaatgccgacgaattcgccgcttttgatttccagcgacacgccgtcaagcaccggtgtatgcgaataaccaaaaacgatatcttttaatgtaacgagattcatgctgaccttcctttcccgcatagaaatagtgtgcaccccgcggcgcacactatgttatttaaccaatagcgaatctttcagtgcatcaaggtttttctccataatgttgatataaccgatgcctttatcccgttctttttggcttaaaccttccagtgtattgagcacttccgttttcgcgccgatttcaccggcaagtgtatctgcaactttaggcgatgcaacttcttcaaagtagatgatcttcacatcatgctttttggcaaacgttttgagatccgccagtttggccgcactcggctcttcttcaggagaaaggcctgcaatcgcgacttgttttaagccgtattctttagcgagatagctgaatgccgcgtgctgtgtgatcagttcttttttcgccgctttatttaatgttgtacggtatagtttatcaagatcctgcagttttgcaatatattctttactatttttctcatagtatgctttattcttcgggtcctgttttacgatctgtgccgtaatggttttgacctctttttgcgcaagaaccgggctgagccacacgtgagggtccatgctgtggctgtggtcatgaccgccgtgtccatgttccttttcctcttcatccgaaccttcgagtaagtcaattccttttgacgcctttacaaacttcgcatgatcagagcccatgcttttttccgctgaaggaacccatgtctccatatattcgctgttgtatacgaaaagatcggcgttttgaatgccggcgatatccttcggcgtcggctcccaatcatggggttcgaccgaagacgggatgagaatgtctacatcgcctttgtctttgacaatttgtttcgtgaattcgtacataggataaaaggtcgtcacgacgtgcagtttgccgctttttgaagaacctgacgaaccttttgaagatgaattgccgcagcccgccgcgattaaaaagcatgccgcaatgacaatgattccgctccattttttaaacaagccgtttccccctgttctgtaaatcagaatgatgacgatttccaaagcgtactttctcgttcatttgttacctataccataataaaacgaagtaattacgttttgcaagattttttttctaaattgatatccgatttacctaaaaagcccccgccatgtatggacgggggcgtcatatcacatatcaggcaagcagataaactcttgtttcgtatgggcggaatgtgatgcgggatcccgtgccgccgtcattttcatagttgctgagaagcagctcggccctttcaggttcggagccatccggccaataaaagacggcttcttcttccgatacgttgctgatggacatgagtttttgtccgtttgcctgtctttcatacacaaacagctgcgggtcatcaggaagcagcagcgtgtagctgccttttatgatatcagcatactgttttcgcaggcggatcagttttttgtaaaagttcaatatagaatcgggatcatcctgagcctcggccgcattgacggttttgtaattgggattgaccgtgagccacggttcgccctccgtaaatccggcattcttgctgccgtcccactgcatcggtgtacgggcatggtcccggcttttcgccataatggacgccatgacttcttccctgttgcggcccatttcaaatacccttttatgatacatattgacggtctgaatatcttgataatcctctattctgtcaaacggagcgtttgtcatgccgatttcttccccctggtaaatgtacggcgtgcctttcatgaaataaagcagggcggcaagcattttggcggatgctttgcggtatgtgccttcgtctccgaaacgggatacgatccggggctggtcatgattgcaccaatacagcgtattccagcctcgatgttccagtttttcctgccagtctgtgagcacttttttcaaatcggacagctcaagcggttttacatcccaatgctcttggcccggcttttgatcaagctccatatgctgaaaatgaaaaatcatattcagttcatgctcatcggttcccgtgtagaccagcccttcctcaggcgtcactgatccggcctcgccgaccgacatcacgtcatatttggaaaatacctctttcgtcatttcttttaagtaatcatgtatccgtgccccgtttggccggaaaggcttcggatcggcccggcgggcgatgtagtcttcatatggcggcaaatattctttttttgacagaagatggagctggtctattctcaatccgtccacgcctttatcgagccaaaatctcatcatctcgtacactgattgccgaacctcgggattttcccaattcagatcggcttgtttgacggcgttcatatgcaggtaatattcgcccgtatgttcttcgtactgccagacggattgtccgtaatccgacacccaatcggtcggcgggccgtccgcggtgcccggccgccaaatataataatcgcggtatttgctgtccggattcatttccgcctctttgaaccaaggatgctccgtggaggtatgatttaagacgaaatccatcacaagctttaatccgcggctgcggcattctgtaagcagatcgtgaaagtcctccatcgttccgtaagattccataattgcttgatgatccgtcacatcgtagccgttatcgacgtttggcgacgggtaaatcgggcagatccatatcacatcagcgccaagttcttttatataatcgagacgcgcgataatcccccgcaggtcgcctatgccgtcgccgttcgtatcttgaaagcttcgcggatagatttgatagacaacggcgtctttccaccagtcattcgccatcttgcgatccccctgtttttttagaaaaccatttcctttatgaccctgctctaaacaaaaaagagaaggtttcccctcctcttttatctatccagctgagacggataaagcgtcatgcctccgtcgacgaaaagtgtcgttccggtcacgtaactcgcttcttccgacaccatccatgcggcggccgcggcgacttcttccggttttccgaaggcgttcatcggaatttttttcagctgggcttgtttatgtgtttcatcttccagatccttattggactccgtggcgatcgtgccgggagcgatggcattcacccggatgcctttgtctgcgtaattgagcgccatcgtttccgtcatcattttgatcccgcctttggatgccgagtactgcacgttttcagggcggggtatttgctgatgaacgctcgatatgtttaagaccgttccttttttgccgctctcgagcatatgtttcagtgccgctttcgcccccaaaaaggtgccggtcacattgacgtcgatgaccctttgccaatcctccaggctcatttcatggggcatcgcttcggtcccgttaaaaccggaattgttgaccatcacgtccacacccctgaaatgctcttgcgcggcatgaaacagcgcctgaatcccttcttctgaggatacatcggcttttacggtgacggctctgcctcccgctttctcaatgatgtccgccgcttcttccgctccggtggaatcaccgaggtaattcacaaccacattcatccgctccttgccgaagcgttcggcaatggcctttccgattcctttcgaagaacctgttacgattgctgtttttccctgtaaatcctgatacattgtctcttttcctccctgatgttaatacagagcatgtacccggttttaatcagctgaaaacaaaagagatcataaaaagaacgatgaaaccgaagctccctcgttcttttttttcattatgcgtagttgttcatttgcagccttttttgcacgccgacaagcctgctgaaaaaataagatgccgctttgtagttctcccgtttatgaaagaaatgagccgcgtcctgaagcagttcctccgtgtcagccaacagctcttttgattccagaacgtcaaaatactctttgagcgaatcctgtccgccttccccctgataaagctctttaatcagacggaatttcgtcatatagatctcatcttcccactccgcagcgcttctcatgccccgcgcgcagctggcggcggcttcactgtatttttccgttttaaagtagatatgtgtgagtgaaaaaacagcctggatgacctgccggaagctgtgtgcttcaaatccggcagccgcccgttcaaaatcctccgccgccttgcaaaagtcacccagactgtacatacagtgcccgatattataataggccgcagcaatcatatattgatcatcaagccgctccgcgtgttccaaggcgcattcgaggtattccagcgcttttttatgctgctgggcgtccatcagatttccggcaatgataaatttgcactgcacccttctcattccgtataattcatatttcttgtaaatatcaagcgcctgccccgcgtaattcatcgaaaagaaagtctgcttgatatgatagtacacctcagaaattttatacagaaactcggctttctctatgtcatcttccacatattcaagcttttcctcagcccgcttataatgagaaatcgctgagatgaagtttttctgcttaaattcatacattcccctgaaatagtaaaaataatattccagtaagccggtcagcttttgctggttcatctcaatctcagtgagcatttcagagaacggaggctggcagtcgccgtctttcatgggttttaatttatccagcatgatgcggtgccgaaattccatcaatgaaaaatacaacaataaatcctggttctcttccatatcttcgagttcatattgaatctcccgcttcagcgcttcagctttatcggcttcaaacgcgcggatcagcttataccattcattcatctttacggccacttcttcagatggaatcttggatttcatagatttgcctccttcctccggctactaattatgttatattttatcatagcaaatttatggcagtgagcaaacaaagattttaatcaattaaagaaagagagaattcaccatgaaacgaccagtcagaattgcgctgcttttgatcctcttcttttccgcagacctatgtttttcctatgtgcagaaagaattgaggccgcagacggcattacaagatagagccattccaagcgctcttcatccgctcgtgaggcagaatgcggagctattgcagacggccgctctgaaaaaaggcatcaccgtcgttatcacagagggtttcagatcaattgaggaacaaaacgaattgtaccgtcaaggacgttcaaaaaaaggaaatatcgtcacctacgcaaaaggaggggaatcttaccacaattacggccttgcgatcgacttcgccctgcaaaaaaaagatggaagcctgatttgggatatgacgtacgacggaaaccgaaacggcacgcccgattggcttgaggtcgtatcgattgccaaaacgctcggttttgattggggaggcgattggagaggctttaaagattatcctcatttacaaatgatccctggctaataaaaccttttcttttttcgcttttgcgcatcaatgtacggaggatagacaggcctgtacacaagcttatatccttcattgccggacggcgtaaaatcgcgctgccactccagccgcagatggaaatcggataaaaaagcggcctttgcttcttcgggagtaacggccggcaccggattgatcttctccagctgctccgggtcaatgtcaggcgccatgtaagcttccacaagccccgttacgggactgacaagaattctcgcagcgccgaaccgcagcggaatatcctgatgccatatggaaaaatggaagcggaacctgccccttccgtccgttttcagcgggttcattttaaaaaactcgtccgctctcggataaagcttgtataaaaattgaagcgcgacggcctcacactcttccgcagaataaaaggccgggccctgatgctcaataaaagatttaaaggctgtcattttccctgtctttttgtccgttttcatcttcattgtatttttgttgctgctttcaaaatagctttcgatactcaaatctttccgttccggaaccgaccctttccgccatgtcgttccgatctcatccccgagatcacgccggcgcgtctgaaccatatccgcggtaaaccccattaattcatccaggctgatttcccgtttatgttcaaacgcgggaagcggttttgccggctcattcctgtcttcgcaaagctgctgatccggcacgatatcatcttcaccggccggatagctgtaagccggcagaatcggttcatagacgagacgcggtattttctcaaaattgaccacatcatagacgagactgaatgtcagcacactcatataatgcgagacgactttttcccgatcgacgaatgtttccggaacgggcgcttcacccttatccccgtaatagataaactgcacgacgaagccgctcctggttacatcaacgaaaaaacctgaatcgggaagcggccggccgagcactttttttgtatagataaatcggatgcacccattgcgttcttccctcgcctgaaagatgaaattcataaaagtaagcgggcggtgtctcgccgcaaaccgaagagccgtcagctttaattcggcttctgacagctgcatgtctgaactcgggcagtcgttgcgtgaataagtaagcaaagatccgtcgtcacccagctcaatcgtgaccgttttatccggatggttacgatttttccatatataataggctctcgttttttgtttttcatcataatcttctatttcaagctcatagtgcggcggtatgttcccgatctccagcgctttttttctcagatgttctttcagcaatggggtcatcctttcagaagagtgtataaaaaagaactgtttttaattatataaaaacgcccttatccttttaaagggaagaaagtgccttttatgtgtctatttttagcaaagagggaaaagagccgtattcagagcggcactttttcatacaaatgtcacactccccgtgaaacccccgggacgaacgcccatgaccttcagcctattaaactcgtgatcgcttctcccgtatgagcctcaataaaccgcgggaaaaccggtttgtatacgagcctgtacactttcccggagctgtcgtcatcgtaacaacgatcccaagcgagctctgctttgatggcccggcggatcgcgtccttcgcctctcccaatgtcaatgaaggaacgggatcgatttcctcgagctctttcggatcaatttccggcggcatatatacagtgacaagacccgtctttttgctgacacagattctcccctctccgaatcgcaaatcaacaccgcccgaacaagccttaaatgtaagccctgcgttttctccttcatcatccggttcatcatattgaacccggaaatactgatccgcttccggaaacatggcgaataaaaagcggatggccatgtgatggcattcttcctcagaaaacaccggttcgccttcactatgtataaatgacatcactccggcgagccggcccgattctttatcctgcattgttttcaatacgtgttcattccgttctttaaacagactttcaaagcttttatcttcccgtacggattttgttttttcaggacgccaggcaatgccgatgcggccgtccccaagatcgctttccctctctttataaaaaccgtcgtgcagcccgatcatgtcattgatgctcattttttccgcttcaggtgcagggcgtgaaatcgggacatacggccgcgtgtcgtcttccagttcttcatattcgtctatttcttcattctcttccttcaggtcggccgatatcggccg

SEQ ID NO: 42 - DNA, 40481 bp, Bacillus amyloliquefaciens
tatctagttttgagagaatttttttcaaaaaaactcttgctttttctgaaatacatagtataataatacatgtcactaaaacgtctggtggcgatagcgaagaggtcacacccgttcccatgccgaacacggaagttaagctcttcagcgccgatggtagtcgggggtttccccctgtgagagtaggacgccgccaggcagacttcattccgcagtagctcagtggtagagctatcggctgttaaccgatcggtcgtaggttcgaatcctacctgcggagccatttatggagagctgtccgagtggccgaaggagcacgattggaaatcgtgtaggcggtaaccccgtctcaagggttcgaatcccttgctctccgccactaattatcaatacataacaaacgaaaaaataccagggcccgttggtcaagcggttaagacaccgccctttcacggcggtaacacgggttcgaatcccgtacgggtcacttatatgatggaggattagctcagctgggagagcatctgccttacaagcagagggtcggcggttcgagcccgtcatcctccaccattatcatcgcggggtggagcagttcggtagctcgtcgggctcataacccgaaggtcgcaggttcaaatcctgcccccgcaaccaaaaaaaatggtccggtagttcagttggttagaatgcctgcctgtcacgcaggaggtcgcgggttcgagtcccgtccggaccgccatttataaaaaggctcggtagctcagttggtagagcaacggactgaaaatccgtgtgtcggcggttcgattccgtcccgagccaccatttgccggtctagctcaattggtagagcaactgacttgtaatcagtaggttgggggttcaagtcctctggccggcactctaaatgatggaggggtagcgaagtggctaaacgcggcggactgtaaatccgctccctcagggttcggcagttcgaatctgcccccctccaccattttataaataggggcatagtttaacggtagaacagaggtctccaaaacctccggtgtgggttcgattcctactgcccctgccactattttatttattcatcttcagattatggcggttgtggcgaagtggttaacgcaccagattgtggctctggcactcgtgggttcgattcccatcaatcgccccattttatcattgggctatagccaagcggtaaggcaacggactttgactccgtcatgcgttggttcgaatccagctagcccagttgcatttttttaaaacaacagcataagatgtattaagttcttttacatgttgcggaagtagttcagtggtagaacatcaccttgccaaggtgggggtcgcgggttcgaatcccgtcttccgctccaaattacggcggcatagccaagtggtaaggcagaggtctgcaaaacctttatccccggttcgaatccgggtgtcgcctttctattgccggggtggtggaattggcagacacacaggacttaaaatcctgcggtaggtgactaccgtgccggttcaagtccggccctcggcaccaatttaactttgaacgaactatgttaaattggtcatcaattttcacattataaaatatatatgagagtgatttgcatattgcagatcactttttttatataataaaaacgtaatgactatcaatataagtttcttgtttgtatcgtatatactgcattaccatttaaaaaactttgctaaaaccgttgacgttttatgaaatacatgttatatttatatacgtcggttgaacacgacgcattacatgccggtgtggcggaattggcagacgcgcacgactcaaaatcgtgttccttctggagtgccggttcgaccccggccaccggtatacaaaggcttctacaatatgtagaagccttttttgttgtatgaaaatatcctccaaagcttgtgaaaacatgatacctgcttattgtataaatccgcttttttcaaagatactaacagcaagttctttgaaagaggtgttttttatggaagggacttgggcttgtcttatcccatttattctggtcattcccatttcaatcattacaaagcaagtgcaatccggtctgtttgtcggtttgctggtcggaagctatcttttgcatcccagcttgcttggcgggattgaacatatggttcaatatataatcagtaatattgtcgtcaccaataatattagaatcattgtgtttctatattcatttgccggtcttgtagggattataaagctgaccggcgggataaaaggattcgtccatttgatcagtaaaaaagttaaaaccaaaaaaggtgcgatgctgcttgcatggctgtcgacatttggcacgttcagtgaaccggactttcgcatcgtcacaattgcaccgatcatgaaagctttaagcaagcgtctggacctgtcgaaacagaaaattgcgtatgccattgagtttacggcaaaccctgtcattgccttgattccgatagcaacggcatttgtcggctacatggtttccattatcggacaggccctcaaaacgtcaggaatagatcagccggcttacacggtgtatgtgaaaagtattcccttcaattttttctccattgtgattatagtagtcggaatttattactgcttttttaagaaacaaaaagcggatgaaagcttagaaaaaacagaaaagagcggacaaacttctgctcgcaaacataacaaaaatacggaaccgattccgcggaacagcggtgtgttgctttcaaaaggctcaggttcattcaacatggaaacagggacgatctcagatattcacggtgaacataccggaatgttcgaaagtgatgagcatgctgaccagcaggaggagctggattcggcgcaccgtgcttatattaaggaaacaccgattcggccgtggaatttaatcattccgatcgggctgtttttgctattgacactctttctcagctggtgggacggccattcaaaagcacaagggtttttgaatgcttttatcaaaagcgatatgcttggcgtcatgttaaccgcattattggcagcggttattgcagcatttgctctttttatgtttcagcgttttcatgcaggcgagcttgttacccattttattaagggcggaaacgaattggtccttgttccggcgcttatcgccgcggggatctccgttgtgttatacggtgcgttttcatttttcagataacaaatactttttgaaggcgttatccgaaaatgggataacgcctttttatgagctgttatactagagaaaaaaagaggtgatgacgtgaagcagattattgcaatgggcggcggaggcttttccatggagccggatcatcttgtgctggatcagtatattttagagcagtcggcgcggtcaaagccaaaagtttgttttttgccgacggcaagcggagattcggagaattatatcggcaggttttatcaagcctttcaaaagctgcggtgtgagccggatcacttgtcgttgtttaaaccgccgggttctgacctcagatcctttctcatgaagaaagatattatatatgtcggaggcggaaatacgcgcaatatgcttgtcttatggaaagagtgggggcttgaccttattcttcgtgaggcttgggaaaacggcatcatgttggcgggtcttagcgccggggcgatttgctggtatgaagaaggattgacggattcagctggagatttgagagagttaagagctttaggatttttgccgggcagcttctgtccgcactatgacggagaagcggagcgccggccggtgtatcaccgtctgatttcagaaaagaaactcagggagggctatgccgctgatgatggcgctgcgcttcattataaagacggtcagctgttccaggctgtctcttcccgggaaaccgcaaagggttatcgggtttttaataccgaagaaggcgttcgggaaacagagcttatgactgtcccattatctgaattttgataatatgcttttttttgtacacaacttgtgttacgatgagagcgaaatcaatagttactgggggtgcccgtctgagcgggctgagagagaagcggcggcttcttaaccctttggacctgatctggttcgtaccagcgtggggaagtagaggttttattattgttgaggacaacaataatagtttctttctgactgcaaaaccgggttcttctttgaacccggtttttttgtgctggtgctgagcttggttctgttattcaaatgaaaaaggagagatttgtatgcaaaatcaatcagtacagcaagcgaacatttccattatgtcgagtttttccggcagtaaaaaggtttatgcagaaggttcttcgcccgatatacgagtgccgatgcgggaaatcagcctgagtgcgactacgggggcattcggggaagaggagaatgcgccggtccgtgtttatgatacgagcgggccgtatacagatccggatgtacagattgatattcataaagggctgggggcgctccgcacaaagtggattaccgggcgcggagatgtagaagaatataacggccggaccgtgagacctgaagacaacggctataaaaaagagggccgtgccgccgaataccccggcctacagcggaaaccgcttcgggccaagccggggaaaaatgtaacacaattgcattatgcgagaaaaggcatcattacgccggaaatggagtttatcgcaatacgtgagcatgtgtctcccgaatttgtcagggaagaggtggcgagcggacgggcgattattccttctaacgtcaaccacccggaaagcgagccgatgattatcggccggaattttcatgtgaaaatcaatgcaaatatcggcaactcggctgttacatcttctatcgaagaagaagtcgaaaaaatgacgtgggcgattcgctggggcgccgatacgatgatggacttatccacgggaaaagacattcatacgacgcgtgaatggattatccgcaactgccccgtgcctgtggggacggtgccgatttatcaggcgcttgaaaaagttaatggcattgccgaggatttaacgtgggacatttatcgtgacacattgattgagcaggcggagcagggcgtggattatttcaccatccatgccggcgtactgcttcgttacgtcccgttaacggccaaacgcacgacgggaatcgtttcccgcggcggggcgattatggcgcaatggtgcctggcccatcatcaggaaagctttctgtacacgcattttgaagaaatttgtgaaatcatgaaggcctatgatatcgctttttcacttggtgacgggcttcgccccggttcgattgcggatgccaatgatgaagcgcagtttgcggaattggagactctcggagaattgacggagattgcgtggaagcacgatgtgcaagtgatgatcgaaggaccgggtcatgtgccgatgcataaaattaaggaaaacatggacaagcagctggaaatttgtaaagaggcgcctttttacacgctcgggccattaacgacggatatcgctccgggttatgaccacattacttcagcaatcggcgcggcgatgatcggctggtacgggacggcgatgctttgctatgtcacgccgaaggagcatttggggctgccgaatcgtgatgatgtaagagaaggcgtcattacgtacaaaatcgcggcacatgccgcagaccttgctaaagggcatccgggtgcacagatccgtgacgatgctctgtctaaggcgcggtttgaattccgttggcgtgatcaatttcatttgtcgcttgatcctgaaagagcaatggaatatcatgatgaaacgctgccggctgaaggcgcaaaaacagctcacttctgttcgatgtgcggtccgaagttctgcagcatgagaatttctcaggatattcgtgattatgcgaaggaaaacggacttactgaagatgaggccgtcaatgaggggctgaaagaaaaagcaaaagagtttgcagagaagggaagccgcttatatcaataaaagaaaagatgaagatggagtttgcccatcttcatcttttttagaaaaacggtgaacggcgaagcggcggaatgctctgctcaaagcggaatatattttccggatcatatttcgttttgacttgacggaggcggtgaacattttctccgtaatacgtttgcggccagtttctgatttctctatcaggccaattcacgtaatctcccatcgtttctcttgatagggacgttctcaatccttcgatccagcggacattttgtctttcttcttcagcagatgtccaagttgtaatatattcttgggcaatgattgcgttgcgatagtagaatgccgtttggtccggagcgatccgtccggccgcaccgccgagagattgctgccagacactggcgttttcgttcggagcgtgctctaaatagcgctttaaagtggaaatcgcgcgtgttgataatggtttttcaataaaggatcctgaccgcttcatcttttgcggctgattgcctcccgggctgttaaaaaaggctgccgctttaataaatggcaatgtcttgaccatgccgcttgtcggttttcccgctttcattaacggagccagcagttctttcagctcatcctttgtcccggtaaattgaccgagcgcttctatgcggttgacttccttaggccagaactgaattgatgaggtaagccggttgtctgtaaatggagcccagcgctgccatgtgttaaatacttcctcaaaatcatcccagccccaagtgacagaaaaaacagacacgcatgagatcggcacggctttaaacatcatggatgtgacaatgccgaagttgcctccccctcctccctgagacgcccaaaatagatcagagtgctttgaacggttgactgtgatcaattcagcacccgctttttcgtccgctatgatcatttcgagctggaggagacgatcgcaagtaagtccggctgtccttgttaaatatccgattcctcccccgagcgtcagccccgtgattcccacattcgcaatggttcccgcaggaagggtcaagccgtaccgccagagtgtccggtagacttcccccaattcggctcccgcttcaatcgagaccagccgcttatcctcatttactcttattttcttcatttcactgagatcaatgactagtccgtcatttaacagggaaaaattttcgtagctgtgtcttccgcctctgatacggaaaggcacattgttctcacgtgcccatctcagcgcattgagggcgtcatgtttattttgacaaaacacaatgatgtctggatatctttgcaggcttaaattgatattggttctcgcagcattatagtccgggtcatcttttttgacgatgcgaccggtcaatgttgtcttttccacattctcactcactttcacttgtaatctgctatgttttctagcatatgcggaaaaatgagagagtgtatgaggaaaacccccggaaggaaacgatattttaaattatagttgacaggtagggattatatgaattaacataatcattacatatttccaaacgatggctgatcggatcaccgaaggctcttatcttttaaacagataagggccttttttgcgtgaaagtcattgaatgaaatgaaaagcggagggatgaaaagtggcgttaaaaaaggtaccacatgtgcgcaaaaagagcaaaaaacgaaaaaagtacagaaaacacacattgaatttcgaactgcttgtagagaaaaacaaacgggagattatgagaaatgagaaacagatggagcagatttatataaagatagatgaaaagcatgcgggggttcgataaagatgaaggagagaaaatggaggataaaaacaacggtactcgcgctgtcggtatccatcacgttatcagggtgcgcgttagggagtgccggagaagaaccgtcatctgcggcggataaaaaggaagaaacacgtatcgcccatgtcaagacaaaggaatttaaagcttctcatccggcggcgattcccgctaaatcgaaagccagaactgatacttttgttgctgggatttccgcgccgggcggcgtgtttctgccgtacttttacgaaaacggctgggacggaaatgcgacagatcctatttttgagccgttagtcaaactggataaaacggggaagccagccccggctcttgcggaaagctggaaagtttccaaagatcagcttacctacacgttccgtttaagaaaaaatctcgttttcagcgacggttcaccgctgaccgcaaaggatgccgcattcactttaacactgctgcatgatcctgcatacgcgggctatgaagatatcaccacggcttatattaaaggcggcaaggcttacaaagaaggaaaggcaaagacgatagaaggcattcgcgtccttgatgacagaaccattcaaatcacgactgagaaagtcagtgcgaagtcgctgcttcttttaggcgggcaggtgctgtcagaagcttactacgggaagaattatcgattcggcaaactggactatttaaaagagctttatgccaaaccgctcggagcgggaccttatcaatttacagaataccttccgggacaggaaatacgctatcaggctaatgaacactattatgccggaaaaccgaaaaccgaaaagctgatttataaaattatcgatgcgtcaacttcccttcagctgtttgaaacgagtgaccttgattacgcttctttctcacctgatgatgatacggttcagcacttaaaaagtctcggttttgccaatataagcgtatctgtcgtgaatgattacgggcttgtgtacgtcaatcacaagcgtctgccttttcaagataagaaagtgtcccaggcgcttatttacggacttgaccgtcaaaaaatcgtcgatgtacgctttaaacgctacggagaggtcgcgaatgttccggtgtctccggtttcgtgggcttatgatgacaaaggtgtcaatcggtacgcgtttaaccctgaaaaagccaaaaagcttctcgatgaagcaggctggaaaacgggcaaagccggtgtacgtgaaaaaaacggaaaaaagcttgaaatcagctattacacgtctaaagcggatgatgatttcatcccgatcgcgaaagaaaattacgcggacatcggaatcgcattaaaaccggaagtgatggattttaatacggaagtagcgaaaataaatgacaaacaatatgaccttgccgccgtttccacctcgcagattcttgatccgaatgacacggtggaaaagctggcttccggccatcccaataatgtaacgggatattccaatccgaaagcggaccggctgatagagaaaggagccggcacgcttgatatcagcaaaagaaaagagatttatcaccagctgtaccgggagctcggggaaaacccgccttacattctgattcattaccgtcagagcgcaagggcggtcagcggaaaaataaaagggcttgagcctgacaattattctggaatcagttcaagtctctcaaatgtctcaattcaatagaacggttgggcaaaatacccggtgcatcctggggattttgccctttcagcggaaaggaggggctttttatgaaacggtatgccgcagaacgattcattcaaatgcttgtgatcttatttggtacgtcctttattatttttttcttattcgccatgctgcctggcgactatattgattccaatgtcaatctgactccggaaagagcgatggagttaaaagcgctttacgggctggatcagccgatttggcagcgctatgtgacgtggctcggaaatgtgctcagcggagattttgggttttctttgaaatatcaggagaacgtcctgtcactgcttcggaaatatgtctggaattcgttttttgtcgcgtttttggcgttgcttgtcacatggtcagccgcgatgattacgggtgtcatatccgctgtcaggaaatactcatggtttgacgggatcgtgacgtttcttgtttttgcttccatggcgttcccgtctttttttatcagccttctgtttattaagtggtttggggtggatttgaaaatattgcccgtcggcgggatgattgataccggaagcacgagtacaggtttttcgtacgtgcttgaagccgccagacatatgattcttccggtcgtgattttatctatgctcggcatcggctcgctgacaaggtatttccgctccggcatgctggacgtgatcagacaggattatatcagaacggcgagagcgaagggattgaaagagcgcaccgtcatctggaaacatgcgttgaaaaacgcgctcattccggccatcaccctgcttgcttttgaactgccgggactgttttccggagccatcattattgaacagattttcgggtggccgggtgtcggacgtattcagctggaatctgtgcattatcgtgattatccggttttgatggcgtttaccttgtttttgtcttgtttaacgattgtggggaacttcttggcggatatcgcttatgccgcggttgatccgcgggtcaggcttaaatagggggtgttcggaatgaaaaaacaaaaaggggtgccgccttctctttggaagcagacgtaccgccgcctgctgcagcataagctgacggtcatcagtcttcttttcttatgttttatgtttttattgtgctttatcgggccgtctttttctccgtacataacagatcggacggatatttcaaatgccaatcagcagccgggaatccatcattggctgggaaccgaccagtacgggagagatgtgctgacgaggctgatgctggcggggcagatttctctgactgtggggcttgcttcaatggtgctgtcgcttgtcatcggttctttactcggggctgcggccggattttatcggggagccgctgatatgatcattatgcgcatcgctgatatgctcatgtccatcccgggcctgccgctgcttttggttttggctgcggtgatgtcggagtggaaagtgccttctgaatacagaatgtacctgattatgatgatgttaagcctgatcggatggcccggtttggcgcggcttgtacgcggacagattttgtcgctgaaggagcagccgtttatgatggccgcggaagttttggggcttagtgataaacggaaaatcctctatcatttgcttcccaatacattgccgttattactggtagcggcgactttgcatgtggcgggagcgatgctgagtgaatcggcgctgagttttctcgggcttggcgttgctccgccgacaccttcttggggaaacatgatggaagcggcgaatcattttatggattttacactccgcccgtggctgtggattccgccgggaacggccatttttctgaccgttgtggcgattcatctgcttggagacggtttaagagacgcttttgatcctaaggtaaaacggcaggtgaaaatgaaatgaaaaaaccgcttttagaagtaaggcatttggaaacggctttttatacagaggagggggcggtaagggccgtggacgatgtcagctttacgatacatgaggaggaaacggtttgtattgtaggggagtccggctgcgggaaaagcatggcgtcattgtccattatgcagcttcttcccgagacggggagaatcgaacggggagcggtgcatttttccggacggaacctgttggaattgaaaccaaaagacatgcagaaaatccgcggcagcgaaatcgggatgatatttcaggaaccgatgacatctttgaatccggtgtttacaatcggtgagcagctgaccgaaccgattcgcgaacatttgttgttgagtaagaaagaagcatggcggaaggccgttgaactgatcacgttagtggagatcccgcatgccgagcaggttatgcaccgatatcctcatgagctgagcggcggcatgctgcagcgcatcatgacggctgtcgcgctaagctgcgaaccgaaattgatcattgccgacgagccgacgacagcgcttgacgtaaccattcaggcgcagatattggatttattgcgggatatgaaaaagcaatttcgcacgtctattttattcattactcatgaccttggcgtggttgctgaaatggctgattatgtgattgtcatgtatgcgggaaaaattgtggaggaaggaccggttgcaaggctgttttctgatccgaagcatccgtatacgaaagggctgctcgcggccaagccggttatcggtcaaagaagggagatgctgtacaccattccggggcaggtccccgagcttgcggacctgtcgggatcgtcttgttattttgcggaccgatgtgaacacagcacggaaatatgctggaaatcgagcccgaattttactgaattcgggaaggggcatcaggcggcgtgctggctttacagagaggagaaagcggatgagtgatgtgttgctggaggtcaaggggctgaaaaaatattacgaggagcatggggggatgagaaagacccgcaaaaatcccgtaaaagcagttgacggtgtcagttttacgataggaaagggagaagtgttcggcttagcgggagaatcgggcagcggaaagtcatcaatcggcaagaccattttgaggcttcatgaaaaaacagagggagaggtgttttttcaggggcgtgatgtgtttcggatgagccggcgcgagctcaaaactttcagatcggaagcgcagctcatttttcaagatccgttcagttctttaaatccccggcgccggatcggagaagccatcggtgaagcgatgatcgagcatcaattggcggtaaagcggaacgcgcgtgataaagcggcggaagttcttgaagcctgcggactttccgcaaactttatcgatcgatatccgcatgaattttccggagggcagcggcagcggatcgtgattgcaagagcgatggcgctcaagccgcaatttatcattatggatgaacccgtggcggcgttagatgtctccatccaggcgcagatgatcaatttgttcagcagccttcaaaaacagcacgggctgtcatatttgttcatttctcatgatttaagcgtggtggagcacttatgtacgaaggtcgccattatgtatttagggacgattgtggaatacgcgtcaaaggaggagctcttttcacggccgcttcacccttatacgaaagcgctgttatcagccgtgcctgttcctgatcccggagcgaaaagggagcggataattttaaagggtgatataccgagcccctctgatccgccttcaggctgtaaattccgaacgagatgcccggcagccaagaagatatgtgctgagaaaagtccggcgctgtcagaaaaagggcttcatcattttgcggcatgccacttcgtgtaattgagaaaaaaacggttttattgataataaacaggaaaaacctgccgggcagaccggcaggttttttgatgttattttggtgatggcagtccgagtccttcggcaacgcgtctgccgtactcaggatcagccttgtagaagtggccgatctggcgcagcttaatttcttctttttccacaggtttcatcgcactgacgatattggcgacaaggcgcgcgcgctcttcctcgctcatcaggcggtacaggtcgccggcttgtgtgtaatgatcatgatgattatagcttacactgtcagcgaaacctgatacaggatatgccgcctgtttatcttcaggtgactctttcgggccgccgaagctgttaggctcgtaatagacggagcggccgccgttttcatcaaaacgcatttgtccgtcacgctgatagtttttcacttcattgcgggaacggttgatcggcagcgcctgatggttcgcgccgacacggtagcgatgcgcgtcatggtatgcgaacaaccggccttgaagcattttgtcaggtgagacgtcgacgccggggactaatgtgccgggagagaacgtcgcctgttctacttccgcaaagtaattttccggattgcggttcagaaccatgcggccgacttcaatgagcggatagtctttttgagaccatacttttgtgacgtcaaacggatcaaagcgatatgtgtttgcgtcttctaacggcatgatttgaacatataatttccatgcggggaaatcgccgttttcaatcgcattgaacaaatcttccgtatggtaatcgggattttcgcccgcgatttttgcggctgtatttacatcaaggtttttcacgccttgctctgttttaaagtgatatttaatccagacgccttcgccattatcatttgtccatttaaatgtatggcttccgaatccgtgcatatggcgaagagtcgccggaatgccccggtctgacatcagaatggttacctggtgcagggattccggcgacagagaccagaaatcccaaacggccgtcggatttttcagatgtgttctcggatctcttttttgtgtatggataaagtcagggaacttgatggcatcgcggatgaagaacacgggtgtattgtttccgacgatgtcgtagtttccttcttctgtataaaacttaacggcaaatccgcgcgggtcgcgcactgtgtcactagagcccagttcgcccgcaacggttgagaaacggatgaagagcggcgtgcgtttaccgacttctgacagaaatgcggctttcgtatattttgtaacgtcatttgtgacttcaaaataaccgtgtgcgcccgcgccttttgcgtgaacgacacgctcgggaacgcgttctctgttaaagtgcgccaatttctcaagcagatggacgtcttgtattaaagcaggaccgcgatcgccggccgtcattgagttttggttatctccgacaggagcgccccagctggttgtcaatttatttgaactcatgtgatcacctctttagatttataaaaacataatatcacctatcagtaaaaagtcaatattattttataatgattataaaataattatttttattatcgaaaaaagagtttggttttgaaagcctacttgactgacgggaataatgggtttaagatgaggaaaaatagaaaccgctgacttggacacaagaggctcttattcttcactggataagggccttttttattgtcaggcggtaagggaggcggcgattgtatgcttttccgacagcattttaaacctgtcgatattcacggtcatctgccgtacagcctttatttcggcaaaaacgataagacattttccgattataaccgggagcggtcagaaagaatgaatctgacttgggactttcctgatccgcatgatgttgatggcgatgagggcgaaatcgctttgatgacaagatgggagaatgaattagataagtacggcattgacgtgctgaattttttaacagcagagagcaatgaccggatggcggcgtttattcaagccaatcccgcgagatttaccggatttgcatatcatcctttggagcgggaggatgcgtatgaagagctgaaaagagcggtagaagagctcggtctgaaaggatataaactgttcgggccgctgacagacatcgattttcatgatccgtcgctgaaaaagctgtggacttatttagctgacaaaaggctgcctgtattaattcactttgggcttttaggaagagcggggggcattgtcagccatcgcaacatcaacccgctctccatctatcgcgttgcgagagagtatgctgatataccgttcatcattccgcatttcggcgccggatattatcaggaactgctgcagctgtgctggagctgcccgaatgtgtatattgacacgtccggctcaaatcagtggatgaggtggatgccgtacccgcttgatttggaaattctgtttcgaaagacatctgaattaatcggtgctgaacggatcatcttcgggacggattcgaacggatttccgagaggatatgtatacagatatcttcaggagcaggtgaggacctgccgggaaatcaatatgcgggaagaagatatagaaaacattttcggcaacaacgcgcggacattattgaaaatcgcccgccaagaaaaggaagtgaatacgtgatacagccgatgcgctctctggcagggttatgccggagggcgtattttaattcttataaaaaacagttgacaagtcggaataatttgaattaacatgatattcaaatttaaaaacaaacgggttgccgatcggaccgccgaaggctcccatctctgcaagcaatcggagatgggggcctttttgtttttcgatcgcacgcggcagaaagagaggggaagacagatggctgtaaccatcagcatacaagaaaaagcttttgagcatgaaggccggaaaacgccggtgctgaatgatattgagctgtcaattgcatcgggagaatttttgactgtcatcgggccgagcggatgcggcaaaagcacgcttttaaaattgattgccggtcttgataccgattataaaggctctgtcacaataaacggccgcaatgtgtcgggaccgggcatccggcagggatttatctttcaggagcaccggctgtttccctggctgacggtaaaacaaaacatcgctgccgatctcaatatgaacgacccggccgttcggaaaaaagtggatgatctgattgaggttgtcaggctgcagggagcggagaacgcttatctgcgcgaattatccggcggcatgtcgcagcgggttgccatcgccagagctcttttacgtgagccggaggtgctgcttttagatgaaccgttcggggcgcttgacgcttttacgagaaaacatttgcaggatgtgctgcttgatatatggcgcgagaaaaaaacgacgatgattctggtcacgcatgatattgatgaatccgtctatttaggcgataagctggcgatcctcagggcaaagcccggccggctgcacagcctgatgccgattcagcttccgcatccgcgcaatcggacgtcagcggattttcaggccgtccggcagaaggtgctttctgagtttgagaaaacggaagacctccggtttgcggatgggtccgggatatagaagggacgaagcgaagtgaaaaaaatcatcattcttttagccgcagcagtcatgatgtcttccggatgcagtgcaaacgggacaggagggagcgggaaaacggtgaaagaaatccggatcggcatccagcagagtttaagcccgcttctcattgccaaggaaaaaggctggtttgaagaggccttcaaaaaagacggaataaaagtaaaatgggtcgaattccaaagcggtcctccgcaatttgaaggtcttgccgccgataagcttgatttttcccaggtcggcaattcaccggtcatttccggtcaggcggcaggaattgattttaaagagatcgggctgtctcaggacgggttaaaggcaaacggcattctcgtaaacaagggcagcgggattcagagcctgaaagaattgaaaggtaaaaaaatcgccgtagccaaaggcagcagcggctttgattttctctataaagctttagataaagcgggtctttccgccgatgacgtcaccatcatccagcttcagcctgatgaggcggtttccgcttttgaaaacaaatcagttgacgcatggtccatttgggagccgtatttgtcgattgaaacgctgcagcacggggcggaaatattggcgaacggagaaagcacagatttatattctcccggtttcacgttagtcagaacgggattttccaaagaacacccggatgaggtggtccgttttctgaaagtgttcaataaagcagttacatggcaaaaggaacacaaagatgaagctgtctccttatatgcgaaaatcaaacatcttgatccgaaagtcgtcagaaacgtgcttaacaatactgagcctctcaatgaaccgatcaatgatgatattgtcaaagcccagcaggaaaccgctgattttcaatatcaaacaaaagcgattcataagaaaattcatgtaaaagacgttgttgacaattcatttattaaaaaagcgcttgaaacgggggatggcaagtaatgaaagcagaagcatcaacggctgccggcgcaataagccaatcagaaaagaaagctctggcaagatcccggaagtattcataccaatggatgaagggggttgtactcccggctgcggtcatcgcagtatggcagtttatcgcaagtctgggcatcgtctcggccacggtgctcccgtcgcctgtcgtcatcttgcagacgtttcaggaacttcttctttcaggtgaactttggggtcatttagagatcagcttataccgggcggctgcaggatttctgcttggcgctggcctcgggcttgttttcgggctgctggtcggtttttcaaagcggacggaagcatatcttgatccgtctctgcaaatgctcagaacggttccgcacttggccgtgactcctctgttcattttgtggttcggatttgatgagacatcaaaaattctgctgatcgcattgggggcttttttccccgtgtacattaatacgtttctcggaatccgcagtgtggacgcgaagctgtttgacgtcgcgcgggtgctggaatttaactggtatcagcagatgacaaaattaattcttccggcatctctgccgaatatcctgctcggcatcaggctctctctgggcattgcgtggctcggtctcgtggtggcggaactgatgggatcgagcgagggcgtcggttatatgattatggatgccagacaattttcacagacaaataaggtgtttgtcggcattatcatttttgcggctgtcggcaagctgacagatgcattggtcagaatgctcgaacggaaactattaaaatggcggaacagttatgaagggtaacctattaaaaaaggagagattcatatggagattctttggtttattccgacgcatggtgacggccggtatttagggacgcaaacgggagggagaacggcggatcatctttattttaagcaagtggcacaggcggcagacagactcgggtatacgggggttctgctgccgacggggagatcatgtgaagacccgtggctgacggctgccgctttagcgggggaaacgagtgacttgaaatttttagtggcggtccgtccgggactgatgcagccgtctgtcgccgcgagaatggcgtcgacaatggatcggctgtcagacggccgtttgctcgtaaatgtcgtagcgggcggagatccttatgaactggcgggagacggcatgtttatcagccacgatgaacgttataaggcgactgaagaatttttaaccgtctggcgcggactcatgcggggcgaaacggtgacatatgaaggggagcatatcaaggtggaaaacagcagtctgctgtttccgccaaaacagtctccgcatccgcaattatatttcggcggttcatcacaggcgggaattgaggctgcggcgaaacatacagatgtctatttaacatggggagagccgccggagcaggtaaaagaaaagattgaaaccgttaaaaaacaggctgccaaggaaggaaggacgatgcgttttggcatcagacttcacgtgattgtacgggagactgaagaagaggcatgggaagcggctgaacgattaatcagccacttagacgaagagacgattgcgaaagcgcaggctgcgctccggcgcgctgattcttcgggacaaaaacggatggccgatctccataacggtgaccgctcgaagcttgagatcagcccgaatctctggactggcatcggactggtcagaggcggagcgggcacggcgcttgtcggtgatccgcagaccgtcgctactcgaattttagagtatcaggcactcggtattgagtcgtttatcttttcaggctacccgcatctggaagaagcttattatctggctgaactcgtgtttccgcttctgccgtttcagaatgaacggactaaaaagcttgagcacagactgggtgaagcaatgggcaacgaccattttgcaagaggaaataaagcgacagtctgatgacgtcgcaaggcggataattgacggcgggcgctttctgcggtttcatttccggggaaattccggcagtgaaggcgggtattcacccgcctttttaagcgcttagcttgcacgatactcatatggatgatatgatacaaaacgtaattattacgatttgttaggagtgctgaaatggcaaaaaaatcaaaagtgatcaaagagctcaagcggcagaagcttgttgaacaatatgcggacatccgaagagaattaaaggcaaaaggagactgggaagcgttgagcaaactgccgcgtgattctgctccggccaggcttcataaccgctgtacggtgacggggcggccccgcggatatatgagaaaatttaaactgtccagaatcgcattcagggaactggcccataaaggccgggttcccggggtgaaaaaagcgagctggtaatgtaaaaaactccggatctgtcatgaaccggagtttttgccgtgcttatgaaaagtgaaaacataagccaaatgctgaatcatcatcagaatgaaaatcaaaagaataggaaaaaagggtagatgcggctgaatcagcggataaaacaaaagcaaaacggctgcggccggcaatgagaagtaaacggcgatatacgaggaacggcaagctttagccgtcatcattcgttctctttcatcctgttcctcaaattcatcgggtacaagcctgtgctttttgccgtttcgttttttcttttcggcatagatatacaatgaggcacaaacggtaaacagcagaaacggagtgatattcagctcaaatgaaccgctcccctccgtttggaaaaactgagcgatccgcggcgccgcttccataaaggaaataagcgtccagcaggctaatccgtagagtgcaaggtgaaaacacgcttttcttttcaaactcattttttctcctcctccagccagaaaacttcctccatcggcagggagaaagcccggcagatgttaagcgccaataaaagtgaaggcacataatctcctttttcaatcgctgcaatcgtctgtctggtggctccggcttcttttccaagcgtttcctgagaatagccgaatctggctctcagctcttttactttatttttcatcatcaggcgtacctcaaattttcttctttttcatattgtatgagatatttaacaaaatgtaaacctaacttaacatatggacaaaaaaagaatttttttcgacaaattttttaacattcccttgacgaaaaaaaaatatacatgtaatattagaaacatcaaatcgctactgacaaaatagaactttgatgcgggtgtagtttagtggtaaaacctcagccttccaagctgatgtcgtgagttcgattctcatcacccgctccatacatacgttattaacgcagtgtttcgtttctctgataaacgaagtattgcgtttttttatgtgaaaaaagacacgaaggcgtgtctttttatgaaagccaagagacggtatgcgtgcctccgtgaatttgttcaaacatttttgttaaggatgatagcagctcatccgccgcgtcggcatgaaatgaaggcgggaaaaagatcagctgcagcattttctttgtgccgggcgtgacagggcgtgtattgatatgtccggtgaagtcgccgaaaacgccgtccgggccggagaaggacagtacgctttctttttctccgatcgtaattgaaattggttcatctatttctgcggcatcatacgccatgataggcaatgaatatttcaaggagaaaaaaagtatggtatcatgggctgaattcacactttcaatgaatcgttcccgggaaatatcgccgagcataagctccatcggcgttttttgtcctgaaaaggcgggactgagctgttccatcaaacgcgcccactctcttacaaaaggctgctcatctataccgccgtcagcataatcaaagtaaagagattcttgaaataaacggaggcggcctttcagcatttgcggagcaggcccgacttcgatctgttcatataagacggctgccgctttgatccccggcacccgttcagcaataagtggatctaaactgatgttcaagtgtgttcactccatttcgggatgataaaactctattatacctgtgcgggagcctgatcacaaagaaaggaggctgtgcaaaaaatgaatattcataaactgaaagaggaattaatcgaatacgccaaaagcatcggagtcgacaaaatcggatttacgacggctgatacgttcgacagtctgcgggaccggctgattcttcaggaatcactcggctatttatccggttttgaagagccggatattgaaaaacgggtcactccgtctttgcttctcccgaaagccaaatcgattgtcgccatcgcccttgcttatccttccaaaatgaaagatgcgccgaggagcacgagggacgggcggcgcggcattttttgcagagcttcctgggggaaggattatcatgacgtgctgcgggaaaagcttgatctgctggagaattttctccagagcaaacatgaggatatccgcacaaagtcaatggtggatacaggagaattgtccgacagggccgtggctgaacgggcgggaatcggcttcagcgccaaaaactgcatgatcaccacgcctgaatacggttcttacgtctatctggctgaaatgatcaccaatctgccctttgaaccggatgtgccgattgaagatatgtgcggtacgtgcacaaaatgtttagacgcgtgtccgaccggcgcactcgtcaatcccggacagcttaacgcccagcgctgtatttcgttcctgacccagacaaagggatttttgccggatgagttccgcacgaaaatcggaaaccgtctgtatggctgtgacacgtgccagacggtctgtccgattaataaggggaaagattttcatcttcatccgcagatggagcctgatccggaaatcgcaaagccgctgttaaagccgcttttgaccataagcaatcgcgaattcaaagaaaaattcggacatgtatcggggtcatggcgcggcaagaagccgatacagcggaatgcgattttagctttggctcattttaaagatgcctcgtctcttccggaattaacggccttgatgcaccaagatccgcgtcccgtcatcagggggacggccgcctgggccatcgggaaaatcggtgacccagattatgcgggggaattagaaaaagcgcttcaaaaggagcaggatgaggaagccatacgggaaattgaaaagggactggagctgttatcggtttctgataagactaaaaccggccggtcctgacatatgtatagagaaaaagcacttggccggagttcaagtgttttttctttataaaacagtatggtgggtggagcgcttgaagcatattattgaagatttagcggaggcccggcttcattatttaatcaacggaaccgagatgaggcacaatgggcagcccggcgatcttgaggtcctgacgagaaaaaaagagctgtttgaaaaacggaaagttgacatcgtgaaagcgaaggcaaaagccgtcattgtcaaaagcagccttgaggacgacggcacgttatgcgtcatgtacacgattcatttcgaatatttgtgcaaggagcatgacggacacctttacttagaagagcagattgaggaacggactgcatttctctatgatcagctgttgattaaagaccgggaagtaaagaaaaaaccggcgggattttctgacggaaacagcgtaattgaatatgagcggagtgaacgggaagatttcgggcgggcgtttcaatacgaccgtctggctgccgtgcagtacgcggagaagttttggaataaacgaaatcccgcttataaaaatttcagcgataattgcaccaattttatttcccaatgtttacatgccggaaaagcaccgatgcgggggcatccgaacagaggctcaggctggtggatgaaggcaagctcgtggagctacagctggacggtcgcgcattcgatgaagatgtatctggcccaatccaaggcagggcttcgcgcggtgcaagtatcgagagctgaagaactgatgcccggagatatcatttgctatgattttgaaggagacgggcgttttaatcatacgacgatcgttgtcgcaaaagataaaagcaatatgccgcttgtcaatgcccaaacgtatgacagcagaatgagatattggtcatatgaggattcaacggcgtatactccttccatcagatatgcgttttttcatattacggatgatacgacaaaagagtaattaatgatataatggtgggcggaataaaaaacagaggtgaacatcgtggcattacatgtcgttttatatcaacccgaaatcccggccaatacgggaaatatcgcacgtacttgtgcggcaacagacacaacgcttcatttgatccgcccgctcggattctcaaccgatgataaaatgctgaagcgcgccggactcgattattgggagtttgtcaacgtcgtatatcatgattcattggaagagttatttgaggcatatgagaacggaaagtttttcttcattacaaaattcggtcaaaagccgcacacatcatttgattactcaaatacggaggaagactttttcttcgtattcggcagagaaacgagcggacttccgaaagaattgatcgaaaacaatatggaccgctgcctgcgtctgccgatgaccgagcatgtgagatcattaaacctgtccaacacggccgcgattcttgtatatgaagcgctgcgccagcaaaattacagagatttgacgtgagaaaaaacgcccgcatccgggcgtttttttattgaataaaaaagacggacagcagctgttcacggcatttttatatttccaggcttaacaacgtaacagtgttatgttacaatacattcatcgaaggagctggattcatggaggaacaactgatttctaaaaaagaattgctggaagaaacatcaatttcatacggacagctgtaccgctggaaacggaaaaatttaattcctgaagaatggtttatccgaaaatcaacatttacaggccaggaaacattttttccgagagcggaaatattaaaacgcatctcaaaaatacagaaaatgaaagaaaatctgtctttggatgaaatgagagaaatgctgtctccgcaaatgactgatgtcaatataacgtctgcggagctgcttcaaaaaggactgatttcaaaggctgcgctgcaagtttatggcgaagacggcgtgacattcacgtcccgcgcgctgctgtctttatatgtgcttgaaggacttttgcgatcgggcaatatcagccttgaggaaggaaaattggcggcaggggtgctgaaaacgtatgaggcttccgaactgaaagcaaatacggagcttgtcatgctccgaaagcttggcgtaacgacgtgcttcatcgctgacgcggaacagattttatttgaaccgactgtcaaagtggttgaacgggtggcgcttgcttcggcatcggaagaattaaaaacgaaatggatgcaggaggaccatcaatggaagtaacagataaattaatcatcaacggttcaggaagttcaaaaggaggccgttttcatacagtggagatcaacggaagcggcacggtgtcaggtgatgtggagtgcgcgagctttttgtttaacggcagcggaaaaacagacggacatgtcaagacgcaaacgctgacgatcagcggttcggggaaaatttccggcagtgccgaagctgaatccatccgtatcaacggaacgggtgtcattaaaggtgatgtcaaaacggagcggctgaacgtcgcgggattttcatctttcggcggcgatgtgaaagctgatgatattttcatatccgggaaagccgggattgaaggcgattgcgagacagagacgttccgttcggaaggtaaatgcaagatcggcggcctgctgaatgccgatgaagtcagtattaagctgacggcgggagaaagccatgtgaaagaaatcggctgccgccatttgaaagtgatgagcagaaagagcgtgcttacgcgttttaagctgatgccggccccggtgctgacagcggagctgattgaaggtgacatcattgaattggcggacacgaacgcgaagacagtccgcggaaatcatgtgcagatcggcgcaggctgcaccattgggactgtggaatacagcggcgattttacatgtgattcttccgctttggttaacgaagtcgtgaaacgataggaggagctgcgatggaaacgacaaaaaaattgagtcatttaaaaatgtacggagccggacacgcctccggcgggtcctaccaaaatgtaagcattaaaggggaaggaactgtcggcgaaggacttcaaagcgaacgctgccggatattcggtacgggactttttctcggagatgccgagatcaacaggctgaaaattttcggagagcatgaagttgcaggagatttatcagcacgttcagcaaatgtgatgggcacattgaaagtcggcggctccatgcgtttcgccacgatgaggctgaaaggacttgctgaaattggcggcggggccgcgggagagcggtgtcatttaaaaggaagtctcaccgtcggcggcgattgcgagacggagctgcttcatgtaacaggatgtatcaatgtggcgggattgttaaacgcgggggacgtaaacatccatttgcgttatgaccgaagccgcgtgaaagaaatcggcggcacatcgatcaccgtcagacggaaacccggttttcttaaacggaaagccggcacgctttctgctgaattgatcgaaggagacgcaatttacctcgaatacacggaagcagacatcgtcagaggaaagcatgtggaaatcggcccgggctgcaaaatcggaaaaatcgagtatcaaacaagctgcaaatctcatgaaaaatcaactgtccaagaacatattcaaatatgaaacattgttatgttgtgcaggaaagggtgctctttatgaagagcacccttttgccgttatttgttttcaggtttgctgtcgtaacccgccgtaaaaatggatactaaaaaagtgagaatgaccccaagtaaaatgatcgttttcatcatttctcctcctctttgcttttccatttgatgtccgagtctggatgaaactgtatttctttcattatgaacggtgcaccggacccttgtcaatgacggccttataacgtctttatttttaagaaacgaaaagcatgtattatcacgttaccgcatagattgtaacaaagtaccttatttctagtgcatcaaacatgatagaggaggttcttatggatatattaaagaaaattgaaaagtacagagaggaagagcagcggctcaaatgggaagggacgttcgctgattatttggagatcataaaagaaaatccattggtcgcgcagtctgctcattctcgcgtttttaatatgataaaagacagcggaatcgaggaggatgacggtaaaaagacatacagctttttctcgcgggagctgttcggccttgaggaatctctggaacggctcgtggaggaatactttcacccggctgccaagcggctcgatgtaagaaaacggattttactattgatgggacccgtcagcggcggaaagtcaactcttgtcaccatgctgaaaaaagggcttgaagcctactcattgacagacaacggcgctgtttacgccattaaaggctgcccgatgcatgaagatcctctccatctcattccccatcatctgcgcgacgacttctacagagaatacggcatcagaattgagggcagcctttctccgcttaatgtcatgcggcttgaagaagaatacggcggcagaattgaggatgtaaaggttgaacgtatattcttctcggaggataaacgtaccggaatcggaaccttcagcccgtctgacccgaaatcacaggatatcgccgacttgacgggaagcattgatttttcaacgattgccgaatacggctcagaatcagatccgcgcgcttatcggtttgacggtgaattaaataaagcgaaccgcggaatgatggagtttcaggaaatgctgaaatgcgatgaaaaatttctgtggcaccttctgtcactcacgcaggaagggaattttaaagccggacggtttgcgctcatctcagccgacgagttggttgttgcgcatacgaacgaaacggagtaccgctcgtttattgccaataagaaaaatgaagcccttcactccaggatcatcgtgatgcctgttccttataatttaaaggtgtcagaggaagaacggatttatgagaaaatgatttctgaaagtgatgtttctgacgtacacatcgccccccatacattaaaagtggccgcgatgttttctattttgacccggctgaaggaaccgaaccgctctgatattgatctcgtcaaaaaaatgaggctctatgacggagaaagcgttgaaggttacaattccgttgatctggaggatatgaagaaggaattccacgatgaaggaatgagcggaattgacccgcgctatgtcatcaaccgcatttcctcaacgattatccgaaaaaatatggaatcgatcaattcgcttgacgtgctgcgctccttaaaagaaggactcgaccagcatccgtccatctccgccgaggacaaagagcggtatatgaattttatttccgccgccaggaaagagtacgatgatatcgccaaaaaggaagtgcagaaggcgttcgtctattcatatgaagaatccgcgaaaactctcatggacaattatttagataatgtggaagcgtactgcaataaaaataagctccgcgatccgctgacgggtgaagaaatgaatcctgacgaaaaactgatgagatccattgaagagcagatcggcatttcagaaaacgcgaaaaaagcgttccgcgaagaaattttaatccgcatatccgcctatgcaagaaaaggaaaacgctttgactataattcgcacgaaagactccgcgaagcgattcagaaaaagctgttcgcagacttaaaagatgtggtgaaaattacgacctcaaccaaaacgccggatgagcagcagcttaaaaaggtcaatgaggtagtggcaaggttaatagatgaacacggctataattcgactagtgctaatgaactactgaagtatgtcggaagcttgttaaaccgctgatgtttgatttcattgagaggcccgtctgtaaaaggacgggttcttttggctgtttttcgcaattgtttgtcaattggagagtccgtccggcataagatgaaaataaatcttttcgccggacttgtttcataaacaggaccaagccggaatacacatgtaaaacgaccataacggttaaggaggggaattcatgtcccgtaatgacagcggaaattttttgatttcagaggaagactggtccctccatcgcaaaggctttgatgaccagcagcgccaccaaaagaaagtacaggaagcgataaaaaacaaccttccggatcttgtcactgaggaaagcattattatgtccaacggaaaagatgtcgtgaaaatcccgattcgttcgcttgatgaatataaaatccgttataactatgataaaaataaacatgtcggccaaggcgacggcgacagcgaagtcggcgatgtcgtcgcaagagacggcgcagataaaaagcagggtgccggaaaaggccagggagcaggcgatcaggcaggcgaggattattatgaagcggaagtttcattgatggatctggaagaagcgctgtttcaggaattagaactgccgaatctgcagcaaaaggaaagggacaatatcgtccataccgatatcgagttcaatgatatccggaaaaccgggctgacagggaatatcgataagaaaaggacgatgctgtcggcctataaacgaaacgctatgacaggcaagccgtcgttttaccctatttatccggaagatctgaaatacaaaacatggaatgatgtgacgaagccggaatcgaaagctgtcgttttagccatgatggatacaagcggttcgatgggcgtatgggaaaagtatatggcgaggagcttctttttttggatgacacgatttttacggacaaagtatgaaacggttgatatcgaatttatcgcccaccatacggaagcgaaggtcgtgtccgaagaagattttttctcgaaaggcgagagcgggggcaccatctgttcctccgtttaccggaagtctcttgaattaattgatgaaaaatatgaccccgcccgctacaacatctatccgtttcatttttcagacggagataacctgacttcggataacgcccggtgcgtaaagctcgtcaatgacatcatgaaaaaatcgaatctgttctgttacggtgaggtcaatcaatataacaggcattccaccctcatgtccgcctataaaaatgtcaaagatgataaatttaaatactacatcctgaaacagaaatcagacgtatttcaagcgctgaaaagcttttttaaaaatgaggaagccggtgtaagcaaagcatcgtattaaatataaagccgagtgaagaatcgtgggccgcggttcttcgcccggcttttttaaattaaaaataaagagaaaaaacggcataaaaaaaatccttaaaaaatgaaacttttctctttacaaaccttctttcatttattaatattttatcttgtgaactattattaagggaatgaggtgaaaatacggtgattgaatcagagctcgctttgctcagttttgaacaactgtttgatacttccagatcgatttacaaaaagcagaaaatgattctggagacagtgcttgaaccttttgatattacagtgctgcagtatctgctgatgttcaaaatacataagagcaaaagcacgcagctttcaaggctggctttgtcgcttgatctgaaaccggcgtctgtcacgagaatgaccgatattctgtataagcgccgcctaatggttcggagcgactatcacgacgaccggcgtgttgttatgattcagttaaccgaagagggggaagaacttctaaagaaagctgctgttcaatatgccgaaaaagcggcggtcttataccggcagctcaataccgctgaactgcagtacctgcgcaagcttgcggaaagtttaacgaagcttgcaaacggctgtgcagtgaaaaacggaaaataaaaaaatccccacatatttttatcatcattccacaaaatgatagaggaagaaacgaaaggagaaaacaaaatgaacagaggacgtttaattctgaccaacattatcggtttgattgttgttcttgcaattataggcggaggtgcttactactattatcaaagcacacactatgtaaaaaccgatgaagcaaaagttgccggcgacatggctgctatcacagctcctgctgcgggtaaagtaactgactggaaccttgatgaggggaaagaagtaagcaaaaacgacgttgttgcaaaaatcaaaggacagcaaaatgctgacgtaaaagccatcatggatggaacaatcgtgaaaaacgaagtgaaaaacggccaaatggtgcaagccggtacgacaattgcccaagaaattgacatgaaacacctttacatcactgcaaacattaaagaaacagacattagagacattgaagtaggaaacaaagtagacgtaattgttgacggcgaccctaatacaacatttgacggaacagtagaagaaatcggttatgcgacaaattcaacatttgatatgctgccttcttcaaactcaagcggcaactacacaaaagtaacgcaaaaagttcctgttaaaatttcactcagcaacccatctgacaaggtgcttcctggtatgaacgcatctgtaaaaatctctgaataatacagatcagtcatcaaaccatgaagggaggttgtcttaggtggctaaatcagataatcaagtaaaaagtcctaaaacattgcttattgtgcttatggccgggttattcctggcgatcttgaaccaaacgcttcttaacgtggcgatgccgcacttaatgaccgagttcggtgtgagtgcgacgacgattcagtggcttacgaccggatacatgctggtcaacggtgttttgattccgttatctgcgttcttaattacccggttcggacagagaagcctctttctcgtagccatgttctgttttacagcgggaacgttagtctgcggaatcgcgcctaacttctcaaccatgctgatcggccggttaattcaggcggtcggcggcggtatcctgcagccgctggtcatgacaactattctgcttatcttcccgcctgaaagcagggggaaaggaatggggattttcggtcttgcgatgatgtttgctccggcggtcggaccgactctttccggctggatcatcgagcattacacatggcgcattatgttctacggccttgttccgatcggggcaatcgttattatcatagcgtttttcctctttaagaacttggtggaaccgcaaaaaatcaaactcgacagcttgggtgcgattctatccattgtcggatttgcctcattgctttacggagtcagtgaagcgggcagcgacggctggggagatccgatcgtgctgtctaccgtcatcgtcggtgtcatcgcgattgccgcgtttgtcattcagcaattgcgctctgaaaaaccgatgctcgacttccgggtatttaaatatgatattttctcactttccagtgtaattaatatcattattaccgttgcgctttacacaggaatgttcctgcttccgatttacctgcagaacttagtcggctttacggcgctgcaatcgggtctcttgctattgccgggcgcgattgtcatgctgatcatgtcgccgatttccggtattctgtttgacaaaatcggtccgagaccgcttgcgattatcgggctggtcatcacggtcgcaacgacattccagtatacaaaattgacaattgacacaccttacacgcacattatgcttgtctatgccatccgcgcattcggtatgtcactgttaatgatgcctgttatgacagccggaatgaaccagcttccggcgcggttgaacagccacggcacggcgatgagcaacacgctccgccagatcagcggttcaatcggaacaagtttgatcacaacgatttatacgaaccgtacgacaatgcactattcgcagattgcggataaaacgagcacggctgatccaagcttcatgcagtcgttccaaagcgcggtttcgaatttaatggtcaacatgaacatgtcgcttgatgcggcgaaacaaaccgtttattcatatctctacaaaacagcttcacttaattccaacgttatggggattaatgacgcgtttatgtgggcgacgatctttgcggttatcggcgtagtcctgagcctgttcttgcgtgacgtacggaaagacaaacagcgggcgaagaaaaaagaggagctgtcattgcttcctgcccctaaagaagtgaaggaatcttaatcatctgaatgggaggtttcctgaatgaaaatttacgtagtgtacgatagtgaaggcgaacatacaaaacaccttgctgaagccattgccgaaggagcacgagaaaacgctgaggctgaagtcctgatcgaccatgtcgatcaagcagacatccgcaagctgaaagacatggatgccattatctggggatgcccgggacactttggcaccatcagttcaggcttaaaagcgtggatcgacagactcggctatctgtgggctgaaggcgagctgattgataaagtcggcgccgtattctgtacgacggcgacaacacatggcggattagaaatgacaatgcacaatctgatcactcctatgtttcaccaaggcatgattgttgtcggacttcccggcaacgttcctgaaaacgcgctgtacggctcttactacggcgcgggcgtcacatgcccggttgacagcgatgtgctgatgacggaagaaggccttcaattaggccgagcgcttggcagacgtgtcagccaagtcacaggtaatctaactgccggacgacagtaaggagagggttatatggccattattatagcggttattgctgctgtcattgtgattgcacttcttatcacattcaatgtccgcagcacttctgcaggacaggatgtcaaagaagaaaagagagaagcgatcggcactacagccgaacagccggaaaagcatgatccggccgaggagcgctcagccgagcatgctcccgtcgttgtgaaatctgaatctccccgtgagaaaaagaatacaatgggcgatgatgtgtaccgtcaggcgcttcagaagtttaagacttctgagacggatcaggaaccaaacgatcctgatagcggcggcaaaatgcaggatagcagctatcgtgatgcgctgctctccttaaaaaacaaaaagaagtaattgaaaaggcaaatctgcgtaatagcggatttgccttttttttattgaagatattgcccgtgggcatcagggaaatcagggaccatctgaaaaagctgacacgtgaaaaaggaatggctgtcatcgtctcaagccatctgctgtcagaaatggagttaatgtgcgaccgaatcggcattctgcaaaaaggggagcttgtcgatattcaaaaagtaagggatgaaggaaaagaggataaagatacatacttcttccatattgaacaaagagaagaggctcttgctgttctgagtcagtttgactgtgtgaagaagacagacggcattgaaatcaggctgtcaaaacaggaggtgcctgatgtgatatcactgctcgtccgtgaaaatatccgcttatatgaagtgaaaatcatgacaaaatctttggaagaccgtttcttggagattaccggcgggacgaaagaggaggttcaatatgtttaagctgatctataatgaatggataaaaattttcagccgcgtcggcacgtgggctatgattgtgattttaggcgtttcgatgatcggttttgcgcttctgtcaaaccatttcacctccagcgaagccaatccgaattggaaacaggagctccaggctgaaaacaaagaaatgaaacagcagatgaaggaaaccggaaatcagacgctcattgataacctgaaacagaatgtcgcgataaatcaataccgtatggatcataacatccccgaggatacagggtacacagtgtggtcatacgtagctgattcttcgatgatgactgttttgaccgggctgtttacgattatcattgccgcaggcatcgtggcgaatgagttcaactgggggacgatcaagctgctggctatccgtccgctcagccgttttcagattttgttatctaaatatatgacggtgctgctgttcggactgctgatgcttgtgattttatttgccggctccgctctgttgggattggtctttttcggtacaggcggagatactgcggctgatgttcatctcgtatacaaagacggccatgtttttgagcaaaatatcatcgctttcctcgctaaaacatatgtctatgaatctgtctccgcttttatgcttgcgacgatggcgtttatgctgtctgcggtattccggaacagctcattagcggtcggattttctatttttctattggttatggggaacacggcgacggtatttcttgctgcgaaatttgaatggaccaaatatattttatttgcgaacacggatttgtcgcaatatatgaacgggactcctttagtagaggggatgacgatgacattttcggttgtgctgcttgtgatttacttcgttatttttctggcgctcgcattcggcgtcttcttaaaacgcgatattgccacctgatataaaaaagctgttttgcctttgcaaaacagcttttcgttttagatgaaaaaaaacctgccggcgtacaccggcaggttttttaaacaatttatgcttttgttacgttagcagcttgtggtccgcggtttccttcaacgatttcgaaagaaacagattggccttcttctaaagttttgaagccttcgccttgaatagcagagaagtgaacgaatacatcgtcttgaccttctacttcgatgaatccgaatcctttttcagagttgaaccattttactttaccttctaacatgaaatttcctcctaaagcgacataacgcttaaattcactattcttgctctaaaacaaacttccaagacgaaaactcttacaaaactttcttcttaaagatagttcgaacaaaaataattacctttactctaccagtaattcgaagaaaaaacaactgctaaatgtaacttttttcgaaataacatgttttaagaggagaacgctctgatacggaaatctgatttgagactagaacagcccatttacagctgataaaaaccgctttacagcctcttaaggaagcaattgacaacccttttttaaatcggtattgtatgtaatcatgagcccgaatatcatggtgcagcctctgtacataaaaatagatagggagtaggtcaacttgaacctgcggcttataaacagtctgtttcttttcattttgatcatatcacttacttcatgccattatcctgacgggaaccggacaattactatcgggatcaatgaatctgatcaatcgatctgggagtttgtcgcgaaaaaagccggtgaggaaggattgcagctttctttggtaacgttttcggattatgccgaggccgatttggcgcttgccggcggggatctcgacgccaatgcgtttcaatccgtttcttattttcaatctttgccgcctcatgtgaaaaagaagctggctcctttaggaacgacatatgcggcatcgctgggggtgtattccaagcaacataaacggctgaaggatataccggacggagcggtcattgccgtgcctggtgaagcggcggacttcggaagggcgctttttctcatgcaggaggccggactgatgacattgaaaaagggattcaccggtacgggttcaactgatatgatcaaggacaacccgaagcatctgaccttaaaaacggaaacaaaaaagaacgcatatcaggcggcggaacatgctgacgcagcagttctcagtcaaagcgaggcgaaaagagcaggatttcatgcggagaaggacgcgctgatccgatcggcgcaaatgaaggaagcgtatattcatctgatcgccgtcagggctgaggataaagatgatgaacggatgcaaaaactcctgtctttgtatcaatcagatgataccgcggcgtttattgaaaaagaatatgagggcagcctgattcctgttttcctgaaaggcggctttctcactgaaaagaaagaatgatttcctcttcgggcgatcattcttttttttcagtgctgcacacttgattgcgccctgatgttttcgctttgtacagcatccggtccgcgatcaggggcaatgtctgaggatccgatgtatttgtcggataatgcgcgatgccgagggaaacggtcacgggaattgtatctccgctcgtcagcagaatcgggttcgcgtcaatcgtgtgcctgatttcttctgcgaggtgaagcccttttgtatacgtgcaattgggcataagcacggcaaattcttcgccgccgatgcgggctgacgggtcagaactgctgagtaagaacctcagacgcgtccccagttctttcagtactcgatccccttcataatggccgtattgatcattgatctgcttaaagtgatcaatatccaaataaataagcgcgagctgagacgagggggattgagacgcccgatcgaacagaacgcgcgagacttcctcgaattttctcttattaaaaatccccgtcagaaaatcataattcgcttgaaacttgtattgcttgaacaaaaggcgggcatcggcttcgtgtttgatgatatacagcgacagcattccgcccaaggtggaaataagccaataataaacgagggccccggcaggctgttcaggcataagaaacagcagcgtcagggtgaaaataacatttgaaaaaagcagcataacgaacgccattttgtgatccggcttttttcctctgaggacggccgcagaaagtatcgcaataaccccgacggcggcgatggaaaaaatggcgcttgtattgaaattgatcaagatacggcctgcgacgataatcgcaaaggcggctgccgtagacacccagcctccgtaaagagcggcgatgataatggggatatttctgagatcaatgatggaatcggagtaagaaaagccgaaagcaatcagaaaaacccctaaaagcccgcagaccgtccccttcagtaattgaaagatcagacggtcttctttatacgaaagcgactctttaaaaagaagggtgaagagataattaaatgtaattaaaatcgttaaattaagaaacagttccttcagcataacaatcacccttatataagttactagagaaagggtggaaagaaaagagaaaagtctataaaaatacatattttgtcaattcttacttgaccgatcggaattcatataatatagtgttaaaggataatgagcaagggagtgtttacctgttttggagaatttatttatagtcttacatgttttcattatgcttttgcttatagcaggtctgtttgtcatgcaaaagaaacacgtttccttttctaaacgtgtctttaccgcgctcggactaggcattgtattcggttttgcactgcaattgatttacgggccggcttcacatatcgtgacacaaacggccgattggtttaatattgccggcggcggttatgtcaaattgcttcagatgatcgtcatgccgctagtctttatttctattctcggcgcatttacgaagctgaaactgacccataacatcgggaaaatcagcggactgatcatcggaattttgatcgctacgacagcaattgctgcggcagtcggaattgcttcggcgctatcctttgatctgaaagccgttcatatcgaccagggaagcaccgagttatcaagaggccaggagctgcagcaaaaatctgaggatatgacggccaaaacgctgcctcagcaaatcgttgagcttctgccgggaaatccgtttcttgatttcacgggggccagaccgacttccaccatcggagtcgttattttcgccgctttcctcggcatcgcttttctgggcgtgaaacggaaacagccggagcacgctgcgactttcagcggaattgtcgatgcggtatacgcgattattatgcgcgtcgtgacactaattttaagactgacgccttacggggtattggcgattatgacaaagacgatcgcgacaagcgacatcgacagcattacgaaactggggatgtttgtgatcgcttcatacgccgcgcttattgtcatgtttatcattcacttgctgctgattacgttcagcggtttaaatccgatcacatacgtgaaaaaagcatttcctgtcatggtgtttgcgtttacgtcccgttcaagcgcaggggctttgccgctcaatattaaaacacaaaaaagcatgggcgtcccggaaggaattgcgaacttcgccggttcattcggcttatcgatcggtcaaaacggctgtgccggcatttacccggcgatgctcgcgatgatgattgcgccgacagtagggcaaaacccgtttgaaccgggatttatcatctccgtcattgccatcgtggcaatcagttcattcggtgtagcaggcgtgggaggcggcgcgacatttgcggctctgctcgtcctatccgctttgaacatgcctgtcgcgcttgccgggctgctcatttcaattgagccgttaattgacatggggcgcaccgccttaaatgtcagcggcagtatgaccgcagggctgttaacgagtaaaatgacgaaggaaaccgataccgcggtgtacaatgattcctcaatcgtcattgaagctgaagaagcttaacaaaaaagcagatcaatggttcattctcttatagaaaaatatgagatagagcgctaaaacgaaaaaatccttca

SEQ ID NO: 43 - DNA, 14883 bp, Bacillus amyloliquefaciens
acaggcgcgcctgttaaagcgaaagagcataagccgggcagattggccaatttctataaaaaagtgctgaattggtcattaagacataaatggattacatctatcatcgcggttctgatgcttgtcggcagtttgttcctcgtacctctgatcggagcgagctacctgcctgcgcaagcggacaaaacgatgcagctcacatatacgcctgaaccgggcgaaacgaaaagcgaagctgaaaaagctgcgcaaaaagcggaagacatgctgcttaaacgcaaacatgtcgataccgttcagtattctttaggttcgcaaagtccgctcggcggaagctcaaacggcgcattgttctacgtgaaatacgaggatgacacgcctgattttgacaaagaaaaagacaatgtcttaaaagaaatcaaaaaaacatccagccgcggcgaatggaaatcacaaaatttcagctcgtcaggcaacaacaacgaattaacgtactatgtgtacggagattcagagtctgatattaaaggcacggtcaaagacatcgaaggcatcatgaaaaagcagaaggatctgaaagacatcaactcaggcctttccagcacatatgatgagtacacgttcaccgctgaccaggagaaactcagcaagcagggcctgacggcttcgcaaatctcccaagccctgatgtcccaaacgtcacagtctcctttgacaacggtgaaaaaggacggcaaagagcttgacgtcaacatcaaaacagaaaaagaccagtataagagtgtaaaagaattagaggataaaaccatcacatcgcctgcaggccaagaagttaaaatcggcgatgtggcgaaagtgaaaaacggcacgacatccgataccatttccaaacgcgacggcaaagtgtacgctgacgtaacggcaaccgtcacttctgacaacgtcacgaaggtgtcatcagcagttcaaaagaaagttgacaaactggataagccggacaatgtatccattgataccggcggtgtatcagcggatattgctgattcctttacgaaacttgggttagcgatgcttgccgcaatcgccatcgtatacctcgttcttgtgatcacgttcggcggagcattagcgccgtttgcgattctgttctcgcttccgtttacagtcatcggcgcattagccggcctgtatgtatccggagagacgatcagtctgaatgccatgatcggtatgctgatgctgatcggaatcgtcgtcacaaacgcgattgtcttaattgaccgcgtcatccataaagaagcggaaggcttatcgacgagagaagcgctcctagaggcgggttctacgagattgcgtccgattctgatgacggcgatcgcgacaatcggcgccctgcttccattggcattgggcttcgaaggcggcagccaggtcatttctaaaggactcggtgtcaccgttatcggcggtttaatcagttcgactctgcttacccttctgattgtgccgatcgtatatgaagtattagcgaaattccgtaagaaaaaacctggaatggaagaagagtaagacagcgggccttggctccttaaacggagctaaggccttttttcttctggcaattcctgtacatattgttgcgattttctcaagtcatagtataattaaaggttgttagtgttaataatggatcggatactcttaagtaggatgatgagataatgaaacgtgcacgcataatatacaatccgacttcaggacgggagctttttaagaaaaatcttgcccaggtcctgcaaaaatttgaacaagccggttatgaaacctccacccatgccaccacatgcgcgggggatgccacccacgccgcaacagaagccgctttgcgggagtttgacctgattatcgctgccggcggagacggaacgattaatgaagtcgtcaacggccttgcgccgttagacaaacgcccgacactcggcatcattccggtcggcacgacaaatgacttcgccagagcgctgggcattccgagagagaatatactgaatgccgctgataccgtcattaacggcatagcccgcccgatcgacatcggccaggtgaacggtcagtactttatcaacatcgccggcggaggccgtctgacggagctgacgtatgatgtgccgagtaaactgaaaacgatgcttggccagcttgcttattatttaaagggaatggaaatgctgccttcacttcgaccgacagaagtcgagattgaatatgacggcaagctgtttcaaggcgaaattatgctgtttttagtgacgctgaccaactcggtcggcggattcgagaagctggcccctgattccagcctgaatgacggcatgtttgatttgattattttgaaaaaagccaatctcgcggagtttatcagagtcgcgagcatggcgctcagaggcgatcatattaacgatcagcacattatttacacaaaagcgaaccgtgtgaaagtcaatgtatcagaaaagatgcagctgaacctggacggcgaatacggcggcatgctgccgggtgaattcgtgaatctgtaccggcatattcacgtcatcatgccgaaagagaaagcggaacagctggatgattaatacgcggacaaaatcctaaaacagtattcgttttaggattttgtcatcttttcagcgtgatcggaaacctttgaaggctgacattgaatttgaaggtttgccagcacgctgaaacaaggctattggtaaaactagaggtgattatagatgaaaatgaaacccccgatagaaaaaaatgaatactatgatgtgacatttgaggatttgacgcacgaaggagcgggcgtcgcaaaggttcagggcttcccgatcttcgtgccgaacgccctgcctgaggaaaaagcgcaaatcaaagtgacacgcgtcaaaaaaggcttcgctttcggccgcttgattgaactgaaagaagaaagcccgcacagaacggatgccccgtgtccgatctacaagcaatgcggcggctgccagcttcagcacatgacctatgaaggccagctcttgtttaaacagaaacaagtcaaagacgtcttagaacggatcggcaagctggatctgtccaatgtcaccgtgcacccgacgctcggcatggaagacccgtggaactacagaaacaaagcacaggtgcctgtcggtgaaagagaaggcggactcgtcgccggattctatcagcaaagaagccatgacatcatcgacatgagcgcctgtctgatccagcaatccaaaaacgacgaagccgtccaagctgtcaaagacatttgcgcagcatacggcgttaaagcctacaacgaagaacgccacaaaggctggctccgccatatcatggtcagatacggcgtcgtcacgggcgaaatgatgatcgtcttcatcacaagaacaagcgatttcccgcacaaagcgaagatcatcgaagacattacggcgcaattcccgcacgtcaaatccatcgtgcaaaacatcaacccaaacaaaacaaacgtgatctttgggaacgaaacaaacgtcatctggggcgaagaatacatctacgacctcatcggagacgtcaaattcgccatctccgccagatcgttctatcaggtcaacccggaacagacaaaagtgctctacgacaaagcgcttgagtacgcggagctgcaaggggaagaaaccgtcatcgacgcctactgcggcatcggaacgatttctctcttcttagcgaagcaggcgaagaaagtatacggcgtcgaaatcgtgccggaagccatcgaggatgcaaaacgcaacgctgagctgaacggcatcacaaacgcggaattcgcagtcggagaagcggaaacagtcattccgaaatggtatgaagaaggcatcacggccgacaccctcgttgtcgacccgccaagaaaaggctgcgacgaagccctcctgcggacgattgtggagatgaaaccgaagcgggtggtgtatgtgtcgtgtaacccaggcacgcttgcgagagacttgcgggtgcttgaggatggcgggtatgagacgctcgaagtgcagccggtggatatgttcccgcatacgaatcatgtggagtgtgtggcaaagctcgtattgaaataaagcagtgttctctttttgagaacgctgctttttatattaatatgtgaagaatcctttttaattattaattacaaaggttatattaaaacagattaatttgaagaaaaatggtattctcaatatagctcaatttagttattttgagcggcgaatttatagagataacgcaaaaagttaatgaaaaggtgaaacaatgatagtttatgaagctacaaaagaagagtttttaagtgatgtgtttgacgataagttggtgatgaatatctgtaaaaactataatgataagattggcaaaatcaatgagagagaggttagatcttgggataactctatgcagtatatgtatagggtattaagtgatagagaaattcctaaggacgcaggaattgctattgagttcaaaataccccatacttcaaagcgtattgattttcttatatctggatcagataaggatgatcgttcatctattgtgattgtggaacttaaacaatgggagaaagtagagaaaattgatagtaaagaggccatcgttaaaacgtttataaataaaggaattcgcgaaacaacccatccatcttatcaagcctggtcatacgcttcgttaataaaggattacaatgaaaatgcgcaaaaagaagatatcaagctatatccttgtacatacttacataactacttgaatcagggtacagacgatccattaactgattcaatatatgaatattatataaaagaagctcctgtttttatcaaaggtgattcaggtaagcttcgtgatttcattaaaaagtatattaaatatggagacaacaaagaaatcctatatacaatagataaaggaagaatacggccttcaaagtctcttcaagattcgttaaacagtatgcttcaaggtaatcgagagtttatgatgattgataatcaaaaagtcgtgtatgagacggctttacatttggcgaatgaggcattacgtacaaacactaaacaagttttagttgtagaaggcgggccaggtacaggaaaatctgttcttgctgtaaatttattagtagaagcaacaaaccgaagtctcgttgcacaatatgtaacaaaaaatgctgctcccagaaatatatatgctactaagttaaaacaaaactttcggaaagggcacattgataatttatttaaaggatcgggcagttatgtcaatgctccatcaggtgaatttgacgttttaattgttgatgaggcgcatcgattaaatgagaaatccggtttatttaataaccttggggaaaatcaaattaaggaaataataaatgcttccaaactttctgtttttttcatagatgaacatcaaagagtaacgttaaaagatattggtagcactgatacaatccttaaattctcaaaagaattagatgctcaggttacaaatatgaaactggattcacagtttcgttgcaatggttcagatggttatataagctggttagatgatgttcttcaaattcgggaaactgcgaattctaattatattggaatgaactacgattttcgtatatatagaaatccaaatgaattgcgtaaacagatagaagatctgaatagagttaataataaagctcgaatagttgctggttactgttgggattgggtgaaggaaggaaaagctaaaacagaatttcatgatatcgagattcctgaatatcaattcggaatgagttggaatttaaataactcagacacgtgggcaattgacgaagattctattaatgaaataggttgtatacacacatgccaaggtttggaatttgattatgtaggtgtaattataggaaatgatctagtgtgcagggatggagtagtattgactgatcattcaaagcgggcgaaaacagatacctccttacgtggtttgaagaaaatgctaaagcaaaattcagaagaagctgagaagcttgcagacgaaattattcgcaacacatacagaactttgatgacccggggacaaaaaggctgttttatttattgtatagacaaacaattagaaaattacttttttaaaaggctgaaacatatgcaaatgaattacaaagagaatgagttctttaagtcttcatcagttgctgaagaaaaagccacatataagcacaaatgaaaccttttttaattatttattaaaacggaattgggaaaaacatcacgctatgatcttgcacatttaaaaagcagggaggcaagattttgtgataactgttaaaggctttttaacgaaatgcgactaaatttctaccgtttttgcaggaaaagaaaaatctatttgtgtaggagatccttacaaagctccttaataaagtggcgattgttaatgacttggggaatgaaagcataatattaacgtaaaacgataaaaggcttcttttaagaagcctttttatgtgcgtatatcttcataataaagataattatttataaaaagataataaagttggataaaaatgaggaaaatcctggcgggaatgacgatataaagttagtgaacaacggtatagtatcttacttttcgaggtgaacagaatgggagaagaacaagacattattacagtaacggatctgcgcaaaaaatatggatcatttgaagcagtgaaaggggtatccttttctgtcaaacgcggcgagctgtttgcatttctgggaacgaacggtgcagggaaatcgaccactatcgatattctctgtacgctgattaaaaagacatccggaaaagtggtaatagacggttatacacttggtgaggggaaagagaataatcatatccgcaaaaagatcggagtcgttttccaagagagcattttggatgaacgattgaccgtttatgaaaatatcatgaaccgcggacaatattatcatttaagcaaggcacaagtgcaagagaactatcagtttgtaacagactatttaaaattggatgatattaaggagaaaaaatacagcgatttgtcaggcggacaaagaagaagagcggatattgcacgtgccatcatccataaaccgactatattatttttagatgagcctactacaggtcttgatccgcaaacgagagtttttgtttggaatgcgattaaaaggctgcaggaagaaacaaacatgacgatctttttaacgacccattacatggaggaggccgctgtggctgataacgttgtggtcatcaaagaaggacgtctgatcgcagagggtacaccgagtcagctgaaagatcaatatgcgtttgacagtctgcatatgatgtttaagcaaggcgttgatccgactgcatggtttgaaaataaacaactggattttacggttaaaaactctatttattcccttcgtgtagagtccactctccaagcgtttgacattttgaaaggtcttgaaggaaaaattgaatctttcgaggtgattaaagggaatatggatgatgtgtttatccatattatcgaagaacaaggaagcagtttgccagtaaaggggagcattgcataaatgaagtctttatccagtttaatcagcagaaatataaaaatatacttccgtgatcgaacgcttttgcttctttctttgctgtcagtatttatcgtcattctgttatatgccgtgttcttacagcagacacagctggacgccattaaggccttggtcggttcgacagatgattccaaagcaatggtgaacgaatggatggtggcgggattgctgtccattacagctgtgacaacgactttaggcgctttcggaattatggtgaaagataaagaaagcaagagaacgtatgactttttaacagctcctttatcaagggcgaccatccaattgagctatgtcattcattcatttgtcatcggcttgatcttttctttcatcgcctttttaggctgtgaaatttttctcgtttcaacaggcagcaagcttttaagcggaacagatatacttgaagtattggggatcattattctttcagttgcactgtcaagttccataaatttatttttaacgctgtttattcacacacaaaatgcattttcgacgttaagtacgattgtcggaacagccatcggttttttatgcggagtatatgtgccgatcggcggcgtaccggtgtttgtgcagaagattattatgtacttccctatcagccacaccgccgttctgttcagaaaagcgtttatgacagactcagttgataaagtatttaaacatgcctctgcggaccaaatacaggaatatgaaaagcattacgggatcgtctacaagttaaacggccattttatcagtacggcagcaagcttgtggatcattgttattacagccatcatatttaccgtcatatctattttcatatttaaaaaacaaaataaatgacctcttcagacgatacataacgatgtaacaggcagcatccgtttactggatgctgcctgttttgtttatcattattctttttgtgctcaattcttaattcctcaaagagttctcggatttctcttaaaaaagtgttgaagatatctttatttacactgtatcgggctggtatatcttgcgaatgaatcagttgacgtttggtgtcttgaagtgatagagaaccatggtagagtcatctaatatttctgcataaagatacatttttgcccattcacaaggtatgatgtcatttaatttcttactaataagctggtacaaatcttgcatttttttagtttccaacctttttgccttcaattgtcgagaaatcctagttataaaaaatagcccagaaaagaagggctgggccattattgatttatagaccgaagtagtttattacaaattctttgtcgtcctcatcttcaggcaaaatccccaagttttgatattcccataccacttgccgttgtgttccgtttaagtctgaggcgatgacatcggtgtaatcgtagtcaattgagaatttgccgcttcgttcgagatgtaaagtgaggtttgtccataagtcttcattgtttgttttaaattcatcccgtaactcttcaaagtaatcatgcaattcatatagaagttcgtcatatatatcttcatcaacattaaaatgttcaggaatatcgtgtgaatatatatattcctgattttgtggagtagtaaagaagaagtaaacttctgaagaatcatctaaaatttcggcataaagagcaaccttttcccactcagaggggataatttcatttatttgctcagcgattttttgatatagttcgcccattttttcagtttccacaatatcagaatcctttttaatttttttagccgtttgaaagcttattatatgtttagatactcttctatgaattttctatcttcctcatcagctggcagtatgccgagattttgatatttccaaacatcgcgtctttgaaggtcatcgagttcagaggataaaacatcatcataattataattaattgaaaactttccggtgttttctaattttaaagtgagatttgtccaaatatcttgattgcctagtttaaattcttcttttagttcttcaaatagctcttgaagttcaatcagcagttgatcgtaaatctcttcgctcacatcaaaatgttcaggtatataatgagaaaataaataaccactgttacttggtgttgtaaaataaaagtatatatccgctgagtcatcaagtatttcagcatataaaacgatcttttcccattgagatggaatcatttcatttagatgttcagcaatcttttgatatagttgttccattttttcagtttccattgatgatcctctgcctttgaattgttgatggcattatttaatatttagataatccttaacaaattctttatcctcttcatcttcggggaaaatacccaagttattgaactcccaaatcatttgtctttcgtattcgtccaaatcagattcaataacatcttcataatcataatcaattgagaacgttccatcgctttcaagattcagtgtcaaatttgtccatgcttcaggattattttctttaaactcattgtgtaactgtttaaataactcttgaagatctattaatagttcggtataaatttttttactaacttgaaattgttctggaatgtcatgagagtatatatattcatcgttttctggtgtttgaaagaaaaaatacacttctctggagccgtctaatatttctgcataaagaacaactttgctccattcggaaggaattatttttcctatggcatcagttatttttagataagctttttctaacatcattatcccaactttattcaactttattaaattggattttcaggatatttatctaaatatttttttattaatttttgtaatgatagatccctaggttcttcccttaaatatttgaatttccagatgataagctgatcactgaaactataatctgtcttaaaccaatctgtataatcaaagttgacagttaattttcctgatatttccaagataagagtgaaagaataaaataattcttgatcatgatctttgaaaacatctctcattttttcgcttagtttaaataattccatctcatactgatcgaattcattttcgtcaatatcaaattcaaacggaatttcaagactgtacttaaaatgattaggttcatgttgagaattgtaaaaaaagtaagtgcctccgcctgtctctgaaatctgagcatagaacaaaaatttctcccatggttctggtatcatttcgttaacggtttcagctatgtttctatatattgcatttaattcattttccaataaggattagcctccagcattataattggtaatttgtaaggatcatttgtatcaaaaaatccccccaataaaggagagggtttttaattttgagaatttagatactgttctaaaaaggattttaaaggtttactcttaggataaattcctacatttttataagtccagattgtttgtctttgagagatggtatatggagattgaataacgtcttcataattataatctatcgagaattctccgcttatcgccagattaagtgttaaattagtccatatatcttgattgttttctttaaattcatctcgtaattcctcgaataagtcatgcaagtcaaataacagcccctcataaatctcctcactgacatggaaatgctcaggaatgttatgagaatagataaaatcttcactatgtggagtattgaaataaaagaaaacctcagatgaatcgtcgagaatttcagcataaagaataacttttttccattcagaaggaatgatttcgttaatgccttctgctatctgttgatatagatcacccattttttttgtctccatattaacctccgacctggtttttaattctcataagtttaggttcttgatcaccaattttatatttcaccctaaaagcagtgggtcttaatgaatctcctttatacaatgcgttgatttcaactgatactttttgaggagggtctgcttgtaaagccgctgcccaatcctgctccattttataccatttcccgccgctcctattaatctgagaattcatcggcacgatgttgtcgaattggcctgagcctttgaattgggtggcgattaggtggcctccgtcgtcatctgtcagacggtctggtttacctgcttttgactgtgcatattggttgcgttttgcttctcccagctgcaagtctgctttgacacttgtaattctaccatagttgtcagtggtgtacgtgtagccttcttttgttttgtagatgacattcggcttcaatactttctttctggtccatttcgcaaaatgctcgccgtatttgaccgttaccggcggtacatgcggtgccggtgtccgtctgccgcttgcggaggttccgtacggtttcggcaggatgaccttggcgaatttctgaagtccttctttaagtgtgaccccgttgactgcgttgtaaggaatgcccgccggcactaagtcgtgacgcggatgatacgggagaatatcagccagggtgagatctcccatttgatttaacttggttttgacgcgtttttttgatacttccatgcctgtgtttactttttgtttgatgtgatcaacggtttgttttgagaccgttatcgctttttgtgctgcggcggatttgcttgctgctgttttgactttggttgtcactttggcggctgtgcctgtttttgagacggcgccgacgccttttgtgccgacaactgatgtcacaacggtgcccactgcatatgacacccatcttgctctggagtaggtgtcgccattcaccatgtctttttggtacgattcttcgattgccgctgaaatggcttcatacgttttgatcgggtgagccaccgctcctgtaatggcttcaaccgttccgcccggatctgtgaccatatcccacaggcctgtgaccgcgtcttttccggaatcataaaggccgacggcaacgcctttgaaaccgtctgtaagttcacgcgtgttttcaatttgagtgaagtagcgctgctgtttttttgtcaggtttttatagccgattgttttggccatttcatagaattcatcggcattcgcataatcgtagtttttcagtctttctttcagtttttcaatctcccgctctttcgcttcttcctttttaatcgtcaaataagcatccgaatgtcttgcaatctcgcctttcttcttatggatgtcgctttcacggtacgccttggcattgtagtgaagcggcgtggcgctttttcctttgcctgtggcgttttggagctgttgaaagtcggcttggatgaactgttcgtttgcttcggtttctgcgtattccttcgttagatcgtgatcaagcttgccgagcttatgtatcgtttcgcttctttttttgtcagctgaagaaagcttctgatctgtgctttcggttgaaaataattcgagcgagatgatgtcttcgatctctccgaggatggagcgcatgtcctttttttgctcttccataatcgcctttgatttactgagggcgtgggtgagctcatgctccagaaatgattcctccacatgcgaattggaaagtccggcatcttcgaccttaccgggaaggcttgtgagaaatgcgattttcatgtcaatcagatcaagccagctgtctgtgacgccggcgtggtccttgaaaaaagctttgatgttatttgcaccccggcctgagaaatcattgtcaccaagatcagccatgccttgaaacgctttttttagattgaccatctgaccgcgcagttttttgtattcacccgcgcgctgtttggcggcggcgaggagggtggttgcttcgaaaactttcatgaccatatcctttcttttgttcgatatcaaaattttaccacgtgagtcatgatatacagtgtaggaaataggtaataagaataaaatgaatcttttggcttgcgacttccttcctgtatgaagggaggctttttatgttttgtacaataaccctcaaattcggcttactgcgctccggtgattttaagcgtgcctgttttttctaatgtcttacactcgaaacaacccaaccgctgaggtataatagaagcagagtatttatcatacagattcaattcgtgaaagagagtggaacaaaatgggccgtaagtggaacaacattaaagaaaagaaagcatcaaaggacgcaaatacgagccggatttacgcgaagttcggccgtgagatttatgtggcggcaaaacaaggcgagccagatccggaatcgaaccaggcattaaaagtggtgcttgagcgcgcgaagacgtacagtgtgccgaaaaatattattgagcgtgcgattgaaaaggcgaaaggcggcgcggaagagaactttgacgagctgcgttacgaaggtttcgggccgaacggttcaatgatcatcgttgatgcgttaacgaataatgtaaaccgcacggcgcctgaagtgcgtgccgcattcgggaaaaacggcggaaatatgggtgtgagcgggtctgtcgcttacatgttcgatgcgactgccgttatcggtgttgaaggcaagacggcggatgaagcgctggaattgctgatggaagctgatgtggacgtgcgcgatattttagaagaggatgacagtgttatcgtatatgccgagcctgatcaattccatgcggtacaggaggcattcaaaaatgccggcgttgaagagttcacggttgcggagctgacgatgcttgcgcaaaatgaagtcgagcttccggaagatgcgaaagctcaatttgaaaagctgatcgatgtgttggaagacctcgaagacgtacagcaggtttatcacaatgtagatttaggcgaataaagacaaaaaggccggggcggcacaagttccggcctttttattttgcttatgcggtcggcctgtatcgtatttctccgtaagcaattattgattatttcgccaaaactgggcggatgcccatacgtttccttccggatatcataaactggactgtaacctatgtgaaggagcgataaatcatgaatgaaagaagaccgatttacggcggaggcttcggaggctacccggggtacggttttggcggctacggaggcttcggaggatatccgggacacggtttcggcggaggctacgggtacccgggatacggttttggcggttacggcggttt

SEQ ID NO: 44 - DNA, 103597 bp, Bacillus amyloliquefaciens
gcggctagaaggagagctcccggtgcttgagcttccggctgacaagccccgtccggctgtcagaagctttgcgggcggcagcgtatcgtgcacgcttgacgctgaaacggcatccggccttcaccgcatcgcccgggatcacggctccactttgtatatggtgcttctcgccacgtacaatacgttactcgcgagattgagcgggcaggaagacatcatcgtcggctcaccgattgccgggcgtccgcacaaagaccttgaaccgattctcggcatgttcgtcaacacgctggccatcagaacggagccgaaaggagacaaacggtttaccgattacttggcggaagtccgccaggcggcgcttgaggcgtatgagcatcaagactatccgtttgaagagcttgtggaacggctcggcgtgcagcgggacacaagccgcaatccgctgtttgacgccatgcttgtcgtccagaatatagagcatgaggaactgctgttggacggtttgcatattcagcctgcggatgtgtcccgtccggtttccaaatttgatgtcactttacaggcttctgaaggcgggggacagattcattttctgtttgaatatgcggcgtctttattccggagagaaacaatgcagcgctgggcttcccactttatgacgatgcttgaacacattgtccgtgaaccggaaacttctttacaagcgatcagcatgctgactgctccggaacggaaccggattctttcggactttaacggcttgacggatcaacagctgcctgaaaaaacagttcatgaactgttcatcacccaggcgcgaaaaacacctgatgccgcggcccttatcagcggggaaacattgatcacatacaaagaattagatgactggtcgaataaaatcgccagagctctgcaaaaacggcagatcggacctaatgcagccgtcggcattgtgataccaagatcgccggaacaagtagcggcagtcttcggggtttggaaagccggaggagcctacgtcccgatagatcctgaatatccggaggaacgcaagcaatatatcatctcagacagcggcacagcgcttctccttaccgcacatggtgcgatagaacaagtgcctgatcgttttaacggtgaagtgctcgcactggaggatatccaagaacaggatgcttcgccggtccagtcattatcagcaccggaaaatttggcttacatcatttatacatcgggaacgacaggcaggccgaaaggggttatggtcgaacatcgatccgtcagccaaacccttcaatggcggagcggattttatgatctgaatgagaaagatacggttcttcagctcttttcattttcctttgacggttttgtaacaagtatgttcacaccgctgatttcaggtgcgaaggcggccgttttagccgaagatgaagcaagagatattcttgctattaaacactatcttgcatcttaccgcatcactcacatgatcattgttcccgtactgtaccgtacactgcttgacgtactggagccgggggatgccgagtctctcagaattgtcacattagccggagaagctgtcgaccaaaacattatcagccgcagtttatcagtttgtccacacacggagcttgccaatgagtacggaccgacggaaaacagcgtcgccactacagcggcaagacatatagaacaaagtgagaacatcacgatcggccgtccgattgagcattcacacgtttatattttaaacggggatcacccgcagccgatcggtgtaacgggagaactttgcatctcgggttccggccttgcaagagggtaccgcaatcttcataagcaaacggctcaagcctttgtccaagacccgttccggaagaaccggcgcatgtaccgcacgggcgacctggcaaaatggctgccggacggcacactgcaatatatcggccgaatggacgagcaagtcaaaatcagaggctaccgggtggaactgaaagaaattgaatccgccttaacaggcataaaaggtgtcaaagaagcagccgtcaccgctcataccgcatcagcaggccaaacggaactatgcgcttatatcgtgacagaagaaggaacagaaagtgaaaccgtgcagcaggcactcagaaatgaaatgcccgcttatatggtgccggcgttctttgaaacacttgaagccctgcctgtcacaccgaacgggaagcttgaccgccgcgcgcttcctgagccgcggaaaaaagcgcacaccggacgggcatttaccgagcctgaaagcgacatggaaaaagagctgtccgcgatttggagcgaagtgctcggaactgaaaacattgccgcggatcaatcattttttgaactgggcggcgattccatcaaagccctgcaagtatcagcccgattacatcaggctggaaaacagatcgccgtaaaagatattttcagccggccgacaattagggagctggcgccttatgtccgtacagagcggcagccggtcagccaagctcctgcagaaggagaagtgaagtggtcgccggttcacaaatggttcttcacacaagacatgaaggaagcaaatcattttaaccagtccgtcatgctgacgagaacaaattcaatagatgaagagatcctgaggaaaacgttaaaagccattaccgttcatcatgatgccttgcgccttgtctgcaaaaaagacgaagagaaaggtcttctccttttcaacagaccggctgacctcccagatgagcagctttacagcctgaccattttagaaacggaaggcgatgagcatgagaaggaacgttttgtaaaacgccgcgtcgccgagcttcagagaaacatggatttggagaacgggccgcttgtacaggcggggctgttccgctctgaagcagaagattacttgtttctgacggtccatcatctcgctgtcgacgggatatcatggcggattttattggaagacttggcttctgcttatgagcaggccgtctctggacaggaaatcaaactccctccgaaaaccatgtcattcaaaacatatacggagcagctggccgattatgccgaaagtaaacagctgcttcagcaggcggagtattggcgggagattgaacactatgaaacagaaagtcttccttacgagcaggcagatttatctcaaactcctgcaaaaaaacggaacacagtatccttcactctgacagaaagtgaaacggacgccctgttgaaagatgtgcacagcgcctacaatacggatacacaagatgtgcttttgacttccgccgtgcttgccattcagaagtggtcgccgcggcacgctttgaaaatcgcccttgaagggcacggacgccaatcggagcaggcaggtgcggacatcagcaggacagtggggtggttcacttccatttacccggtgcttttccggagcggagcttatgaacctcatgaagaatatgaaattcgcacattgaaaaccgtcaaagacacattgcggcgcattccggataaagggaacggatacggcgtcctcaaatatttaacaccgccgaagcttgccgggatgactttcgggaaagcaccggagatcagctttaactatctcggacaattcgatgcgcccggcgggaatccggcagaaacggaacagccagacgcgtttcagttttctcctttgggaggcggagatgatgtgacagatacatggaaacgggagcagtcacttgaaatcagcgcgattgcggcaaaaggccggatgaccgtcagcatttcctatgaaacggagcgcttccggcgagatacgatcgaacggctgtccgaaagctgccggtattatctcctgaaactgtcggaacactgcctcagcaaaaccgatacggagaagaccgtcagtgactttgatgatcgggagctgactgaggaagccttgcaggatattgccgacttactcagcttccactaaaatcgagcgggaggaacacatggacaaaacgaaaaatatccaaaacatttatcccctcagccgaatgcaggaaggaatgctttttcattcctttctgcaaaaggagggggctgcatatatcgagcaatccgtcttcaccataaaaggccggcttcgtccggaattgtttgagcaaagcgtacagtctgtcatcagccgccacgatattttcagaacggtttttttacctcatgtcgctcagctgaacggcccccgccaagttgtgctgcgtgagcgggaattccggctgcaccgcgaagatcttacacatttggacgaagcggaacagagcatctatttacagcgatttaaggaacgtgaccgcttaaaaggctttgacttgcaaaaggatatgctgatgcgtgtttctttgtttaaaacgggtgacgaaaaatatgtatgcgtctggagccaccatcacattcttatggacggctggtgcctcggcatcgtccttcaggaattcatgcatatgtaccgggcgattgaatcaggctcacccgtcacactggcgcccgcaaagccttacagcacttatattacatggctgactgatcaggacaaagacgcggcttctgaatattggaaaggatatttagcaggctgcgagacacccacaggactcccgaaaatatcggcccgtccccaggaaaaaggctaccgtaagaaagagctcctgttttctttagatcaaaacctgacagacaggctgaaaaccatcgccaaagaagagggggctacgctcgcggttcttatgcagactgtatggggcctgatgctgcagcgctacaaccggacggacgatgccgtattcggtgccgtcgtatcagggcggccttccgtcattgacggggtggaaagcatgatcgggctgtttatcaataccgtgccggtacgcattaaaacgggtgacgaaagctttagagaactgctggggcgcttgcagaaagaaatgcttgactcagaggcgttcagttatcatccgcttgctgacatccaatctcagactgagctgaaacaggatttaatcgaccatattatcgtgtttgaaaattatccgatccagcagcagatgaaagacgcggaaaaggaatcggatgcaccgttccggatcgggtatgtcaacgtttcggaacaatcgggctacgattttaacctcatcatagcgcctggagatgagctgctcatcaaattcagctacaatgcgaacgtttatgacgaagtatggatagagagcgtaaaaggacatttggaagaagctctgcgcggcgccgccttcaatcccgatgttcccgctgatcggcttccgatgctcggacaaaaggaaaaatcaagaataatcggcgaatttaatgacacgaaaacaacttatgaaagagacgaaagcatcatcagcctgttcagccgacaggtgaagaaaaccccggatcatcaagcgcttcacgtcggcgggctgacgttgacgtaccgggagctcgatgaacggtcaactgcattcgcccgcatcctgctggaaaacggtttggcgccaaagggaattgccgggattctggccgaacgctcaccggaatttatcatcgctgttctcgctgtattgaaagcgggagggacgtaccttccccttgatgcagaactgccatccgacaggatcgccgatatgctcactgagagcggagcacagctgttaacggtacaaaaagggattgagactgatattgacttttctcacatcatctctatcccggctgcagctgaaaaacaaacagctgatgcgggaaagctgaataccgatacagcacctgatgaccttgcctatattatgtatacatccggttcaacaggaaaaccgaagggcgtgatgatttccaaccgaaacgtcgtatcgctcgtgtcaaacagcaattacacgtcggccggtgtgacggatcgtctcattctgacagggtccatcggttttgacgcagtgacatttgaaatcttcggagcgcttttgaacggagcatgtcttcatgtggttgaccgctcgacaatgcttgcccctgagaggttcggcaattatctttcttccaaccggattacgattctgtttttgacgacggcgctctttaaccagtttgcccagacagatccggagatgttttctgggttgcacaccttatatgtcggcggagaagcattgtccccggcgctcatcaataaggtcagacaccgctgtccgaatctcagcctttataacatatacggaccgacggaaaatacgacattttctaccttttacgaaatcaggcacgatttttctcagccgatcccaatcggaaaaccgatcagcaattcaaccgcgtatatcattgataaaaacggcggacttgcgccgatcggcgtgcccggtgagctttgtgtcggcggtgacggggttgccaaaggctatttaaacaggcctgacttaacaagtgaagcatttgtcagccacccggttcatcctgaagaaaagatctacaaaacaggcgacttggcacactggctgcctgatggaagcatcggatacatcagccgtatcgaccgccaattcaagattcgcgggaagcggattgagccggccgaaattgaagcacgcttgactgaaatagatggaatcagggaatcggcagtcatcgcagcaaaagaaggacaagaagcaatcctttgtgcgtattatacaggcgcatatgctgaagaaagagccattcgatccctgttggccaggtcgcttcccgactatatgattccgcagtatgtgattaagcttgaccgtatgccgcttaccgcaaacggcaaagtggaccgccgcgggctgcctgcgccggaacggaaaaaaacgtcatcaaaagccgttccgccacgaaattgggtagagcgtgagctgatcgacatttggacgccgatcctcggctgcggggagctgggcatacaggatgacttctttgagctgggcggccattctttgaaagcattgcaagtgattcatcaactgaagaccaggcagcagatggatgtgccgattgaaatgatatttgaatatccgacaattgaacaattggccgaaaagctgtattcaaacacactgtcagaagctgcagagcagcatatcagcagactgaatcagccgaaaggccgcaacctattctgttttccgcctatctcaggtttcggcattttctttaaagatcttgcggcggcattaaacggacgggctgctgtgtacggctttaactttattgaagaagacagcagaatggaacaatacattgataaaatgctggaaatccagccggaaggcccttatatcctcttcggatattcagcgggcggcaatacggcattcgaggcggcaaaagcgatggaaaagcgcggcttagaaatcagcgacgtcattatcgcagacgcgtacagaaagcttgacgcactgccgccgcagccaacaaacgcaacagccgacaacgtcccggaagccgtcagagaagcagtcatcaaaaagacagagcgctatcaaacgtactgggcggaactgataaatgacggccaaatcgctgcaaacctccattttatcgaagccggcataaaggaagagcacagtgataagaccgagccgatgaagtgggaaggcgccacaacgggactctatcaggaatatcaaggcgggggcgcccataaagatatgtttgaacccgcctttgcacagcaaaatgctgaggtcatactggacatcattgcaaacagcggaagacgcttggcgcggaatctgtaacatccggcagaatggctgaagaagacaaggggcaagataggggaatcaaactcagtttttttggaggctttgagatgacgaacctatcttggcttacgtatgtaatgatcattcttgccagctaccggctgacccatttgatcgtatttgataagattacggaattcataagaaaaccctttatcaagcaagaaaaaaccgtcgatcaaaacgggcgcgccgtccaaaaaaaagtcccttcctccgcattcggttatatgctgcaatgttattggtgtgcgggtgtctggtgcgccatattgatcggcatctgctacttggtctggccccgctatgcacatccggttatattcattttgtccatcgccggagcgcaggccattcttgaaacatgtgtcggcgtcggaacgaagatcattgacgtgctcgccgccataaaacataaaaagtcctgaagcgttttattcgctttaggacttttttctttcccttttaggctgagaggagcaaagcaggctttctgattcaccgcccggaatgcttcggaataccgtaaagcagagagggggaaaaacatgaaaagctgccgttttagcatgatatggtttttgaccgttgtactgacagccggtatctttacattctcagcatccgcacaagcaagcggcactcagccggagagagaaatgagagccgtatggatcgcgtctgtaaccaatatcgactggccctctaaaaaagggctgtcgccggaagagcaaaaaagtgaatacagcaagctgctggatgacgttcaggagatgggaatgaacgccgttatcgtccaaattaagcctgcggctgatgctttttatccatcagattacgggccttggtcagagtatctgacaggaacacaaggcaaaaatcccggctacgatccgcttgcttttttagttgaagagacacataaacggaatcttgaatttcacgcttggttcaatccttaccggatcacgatgaatcacacaaatttgaatgcgctttcagatgatcatcccgcgcgttcccatccggactgggtcgctgcatacggaaaacagctgtactataatccgggcattccggaagtaagacaatttataacggatggaatcaaagaagtggtcagccgttatgacattgatgcggttcatatggatgattatttttatccttataaaattgccggacaggaattccccgatcaggcggaatacgaacggtacggaaaggctcactttgcatcaattgatgactggcgcagggataacgtcaaccggcttgtaaaagaaatcaaccaaaccatcaaacgagaaaaaccttatgtcaaattcggaatcagcccgttcggcgtatggagaaatgccgcagatgacccgacaggctccgaaacggccgcaggggtgcggaactacgatgatttatacgctgatacgagagaatggatccaaaaaggatacattgattacatcgcgccgcaaatttactggagcatcggatttaaagcggcggcatatgacgtcttagcggattggtggggaaaagaagtgaacaatcggccggtgcatttatatatcgggcaagcagcttataaaatcaacaacaatgctgatccggcctgggccgacccgggggaatacggaagacagattactctaaacaggggatcagcttggattaaaggaagcatgcatttcagtttaaaggatttaaaccgtaatccgctcgatgtgaaaaaccgtttgatcaaagacatgtacagccggcccgcattaattcccgagatgccttggctcggacattccgctttaaaaaaaccgtctgtcaaacgggcggagaagaatgcttcaggccatacactctatattgaagatgcgaaatccaacggtaaaaaaacggcttattacgccatttaccgcgcagaaaagggaaagcagccttatttagtggatacagtcagaaaaacatcgtcacggacgcagacattttcagatactgatactcgggcgaaaggagcctgcacctatatcgttacttccgttgacaggcttcaccatgagagccgtccctccgcaaaacagatggttaaatagcattattaataaaactgacagttgcggcgctgtcagtttttttgcagcggatgagtccgaatgttcagacttcatttggatggaatgaataaagacccccattaataaaatgtagaaagcagcagaaggaggaaggttaatgaattttcaactgacaaaagaacagcagatggtgcgcgaaatggtcagagatttcgccaaaaatgaaattgccccgaaagcccatgaggttgatcaatcagccgtcttcccgatagacacatttaaaaaaataggcgaactcgggctgctcggaattccgtttccggaagaatacggcggggcgggcggtgataccatttcatatgcagcagcggtcgaagaaatcggaaaagcctgcggcagcactgggctgagctacgcggcagccgtgtcactcggcgcaagcccattatactatttcggtactgaacagcaaaagcaagaacatcttattccgcttgcttcgggaaaagcgctcggatcattcgggctgacagagccgaatgcaggttccgatgccggcggtacccagacaaaagccgagaaaaagggcgatgactatgtgataaacggagagaaatgctggatcacaaacgcaaattacgcccgcactgtcattgtcaccgccgttacaggaaagaactccgacggaaaaccgatcatttcagctctcatcgtcccgacagacacaccgggatttacgatcacaaatccgtacgacaagatgggtgtgagagggtcggatacggccgagcttgtgctggaggatgtcagggtgcctgccgataacctgctcggtgatcctgaaaaaggttttaaacaatttttatatacattagacggcgggcggatctcgattgcggcactggctgtcggtatcgctcaaggcgcactggaggcgtcgctgtcatatgcgaaggaacgcaagcagttcggcagtccgatatcgtcatttcaagccattcaatttaagctggccgatatggcgatggaaattgaccttgccagacagatggtgcttaaagcggcatggctgaaggatcaaaacctgccatttacgaaagaagcggcattcgccaagctttatgcttcagaaatggccgtcagagcatgccttcaggccatccaaattcatggcggttccggttatatgaaggaatgcggtgtcgaacgtatgcttcgtgacgcaaagctgatggagattggcgaaggaacgtcagaaattcaaagaatggtcatcgcaagacagcttttgaagtaaaatgaaaacgtttactaagacagggatggaaaggggcaggtcatatggctgaacttatccatttaacagccggaaagctgcttgagcggaccgcggagctttttccggatcgtgaagcggttgtttaccctgagcgcggccttcgttatacgtatgccgagtttgaccggttatgccggcaaaccgcaaaagggctgatgaagctgggagttgaaaaaggagatcatgtggccatatgggcatccaacattccggaatggctcgcggcgcaatttgcaacggcgaaaatcggcgccgttctggtcaccattaataccaattttcaaatcgcagagcttgattatctgctggcacattcagatgtctcggccctgataatcatggattcctaccggcagacatcttatgttgaaatcgtgaataagctgattccggagctgaaaacgtgtgagcgcggcaggctgcgttcgaaacgttatccctttttacggacggtgttatatatcggtgataaaagcccgcccgggatgcaccgttgggattctttgctgaaggatgctgaatctgtaacggatgcagagcttgacggaaggatggacagcctgaaaaaggatgattgcattcatatgcaatatacatcaggtacgaccggatttccgaaaggcgtcatgctctcacattttaatatcgtaaataacgcggcaaatatcgcagaatgcatgaagcttactccaagtgaccgtttatgtattcccgtgccgtttttccactgcttcgggtgtgtgctcggcgtgctggcatgtgtttccgcgggtgcggcgatgattccgatcgaacagttttctccgccggccgttctgaaaacggtggagcaagaagcctgcacggctctgcacggtgtaccgacgatgtttatcgccctccttcatgacagccgtttttctgaatatgatctttcccacgtccgaaccggtattatggcaggctcgccatgcccggcggaagtcatgagagaagtgatcggcaaaatggggatgactgacattacaattgcctacggacagaccgaagcatcacctgtcattacgcagacaagaacggatgattcatttgaaagaagagtggaaacagcggggcgcgcgcttccccatatcgaagtcagaatcgttcggcccggaacatcccaagaagccgcgcggggcgaacaaggagagctctgcacccgcggatatcatgtcatgaaaggctattataaaaatcaagaagcgaccgaagaagcgatagacaaagacggctggctgcataccggtgatttggcggtcatggacgaggacgggtactgcaaaatcacgggccgtctgaaagatatgctgatcaggggcggcgaaaatatctatccgcgcgagattgaggaaatgttatatcggcatcccgcggtagcagacgttcaggtcgtcggcgtgcctgatccgaaatacggagaagaggccgcggcatgggtcaggctcaaagacggacaaaccgcttccgcagaagacatcagaaccttttgcaaagaacatatcgcccgctataaagtccccaggtacgttttgtttacagatgaatatccaatgacagcctcaggaaaaattcagaaattcaagctgcgggaaaaaacgattgaagagctcaagttaacttaatgaaaaaggagtgcttcacatttgtttaaaaaagtcctaattgccaacagaggagaaatcgccttaagaattatccgcacctgcaaacgtctcggcatcccctcggcagctgtctattcagaagccgaccgggacgcgctgcacgtaaaagcggctgatgaggcctatccgatcggaaaatcgagagtaaatgaaagctatttacatatcgacagaatcatagaagccgccaaatccgccggagcggacgccattcatccgggctacgggcttctgtcagaaaacagcctgttcgccgaacgctgccggaaggaacaaatcacatttatcggtccgcccggtgatatcatcgcaaagatgggcagcaagatagaagcccgaaaaacgatgcaaaaagcaaaggtcccgatcgttcccggtgtttcagagccattgcccgatgttcactccgccttagcagaagcccgtgccatcggctttccggtcatgctgaaagcgtctgcaggaggaggcggaatcggcatgcagatcgtacattcagaagaagagctggccaaagcgtttgaaggcaatcaaaagcgggccgcgtccttttttggagacggcgcaatgtacatggaaaaggtcattgaaaatgcccgtcatattgaaattcagatactcgcagattctttcggcaacaccgttcatctgtttgaacgtgactgttcagtccaaaggcgccaccaaaaagtgatagaagaagcgccgtcgccgtttgttgacgatgaattaagacaaagactcggtgaaaccgccgttaaagccgctaaatcgatcggctaccaaaatgcaggcacaatagaatttctcgtcgaccaaaagaaacaaatctattttttagagatgaacacaagactgcaggtggagcatccggtgacagaagaaattacaggactggatcttgtggaagaacagctgaaaattgccgctgggcaggcgctgactttctcgcagaaagatatcaaccaccgcggtcacgcgattgaagtgcggatctatgcggaagatccggtcaccttttacccgtcacccggtaccatctcgtctttttccgttttaagacacccgtcagtgcgacacgaatgcgccgtcgaaaagggaagcgtcatttctccgttttacgatccgatgattgccaaaatgatcgtcacggcgaatacgagaaaacaagccattgaacaactgaaaaccgcccttggcgaatatcatgtagaagggattaaaaccaacattccgctgctgacaaaaattgccctttcagaagtatttgaaaagggcgaggcaacaaccggttttttacaaagaatgaacgagggggcgtcaaaatgagcgtcataaaaattcagatggcgggaaatctgtggaaaattcatgtgaagccgggcgatgtcattgaagaaggacaggaagtggccatcttggaatctatgaaaatggaaattccgattatcgctgatgcagcgggtacggtgaaagaagtgaaaaaatcagaaggtgatttcactgatgaaggagaggtcctgattgaacttcaataaaaaaggaggtgcagcatgaactgtccgaaacatgtccgcatcaatgaagtaggaccgcgtgacggcttgcagaatgaatcagcgtgggtggatacagaagataagattgagtggatcaatatgctgtcaaaaacaggccttccctatatcgaagtgacatcattcgtgcatccgagatggattccggctcttcgtgacagcctggacgtcgcaaaaggcattgccagatctgaacatacggtctacgcggctctcgttccgaacctcatcggactggagcatgcggcagaaggcggaatcgatcaggcatgtgtatttttatctgcaagcgaaacccataaccaaaaaaacgtaaacaaaccgattgaccagaccgttcaagagctcaggcgggttattactgaagcaaaagctgaaaaaatggcgacgagagcttatctgtctactgtgttcggctgtccgtacgaacagaacgtgccggtcgaacaagtcatccgcctgtcagacatcctgctcgaaatgggtgttgatgaaatatcgctcggcgacacgatcggcgcggcaaaccccttgcaggtcatagccgtgcttgaagcccttttgccgagaattcccgcctcaaaaatcgcactccatttccatgatacaagaggaacggctctagcgaatatcattcccgctcttgatatgggcatcacatcctttgatacttcctcaggcgggcttggcggctgcccgtacgcccctggatcagcaggcaacgctgccacagaagacgtcatttatatgctcgaacaaatggggattgataccgggacggacatgaataaacttctttatgccgccggctggatcgcggataaaataggcaaagacctgccaagcagaaacctgcaggcattcagaacgaaatgagaaaggagaagccatggaagattgcgtcttgtattccgtctgtcaagaaacgatcggtctgatcacgctgaaccgcccgcatgcggccaactcgctgtcttcagaaatgattgatcatttacagcgtgtgattgaagacatcaaaaactcgccatccattcgttgtgtcattctcaccggcaacgggaacacattttgcgccggtgctgatttaaaagaaagagcggggatgaatcatgaacaagtcagacaaagcgtcaggcgtatcggtgacacggccgcatccattgaagctctcccgcagccggtcattgcagcgctgaacggaaccgctgtcggaggaggccttgaactcgctctcgcctgcgatatcagaatcgccgtcagccgggcgggcctcggccttcctgaaacagggcttgcgatcattcccggagcgggcggaacgcagagactgccccggcttattggccctggcgcggcaaaagaattgatctataccggccgaagactttctgcagaagagggaaaagacatgaagctgatcgagcatgtttgtgaagccgatgaacttatggaaaaagcaaaagcactggccggccgcatcgccgctaatgggccgatcgccgtcagacaagcaaaatccgcgataaacaagggtctggagacagatctcaatacagggctcgaaatcgaacgaaaagcatatgaacaagtcatccccacacttgacagggaagagggcctgcgcgcttttaaagaaaaaagaccccctgaatacaaaggaaaataaaacatggagggactcggatggattacgaaaaagaacggcagacacgcagcaaaacgattgaaaagggaggagccgcgaaatatcacgcaagcaacgaaaagaagggaaaactttttgtaagagacaggctgaagcttttattcgatgacggcatatccgttgaagacgcttttttcgccgagtgcatgtcagacggactgccggctgacggggtcgttaccgggatcggaaccatcggcggcagaaccgtttgtgtgatggcaaacgactcaaccgtaaaggcgggctcgtggggcgcgaaaacggtggaaaaaatcatccgcattcaggagacggcggaaaagcttcagtgtccgctcttgtacttagtcgattccgcaggtgcgagaattacggatcaggtcgacatgttcccgggcagaaggggagccggccgcatcttttataatcaagtaaagctgtcgggccgcattccgcaaatctgtttattgttcggcccttccgctgcgggcggcgcttacattccggccttttgcgacattgtcattatggtcgaaggcaatgcatccatgtacttaggctccccgcgtatggcggaaatggtgattggcgagaaagtatcgcttgaagaaatgggcggcgcccgtatgcattgttccgtatcaggctgcggtgatctcctcgccccgacggaacaagaagcaatcatgatggcgcagacatatctcagctattttccgtcaaattatactgaaaaagcgcccgtcaacaaatctaagaacccgaaagcttttgaaaaaccgctctcagatgtcatcccggcacatcaaaacgcaccgttcaacatgatggatttaattgaacgtgtcattgatgaagactcattttttgagattaaaccgttatttgcacaggaattaataacggggcttgcgcggattcacggacagccggtcggcattatcgccaatcagccgcgtgtcaaagggggggttttatttctcgattcggcggataaagccgcaaaatttatcgctttgtgcgacgcattccatattccgcttctgtttttagcagacattcccggattcatgatcggaacgaaggttgagcaggcgggcatcatcagacatggcgcaaaaatgatctccgcaatggcggaagcgactgttccgaagctttctgttatcgtcagaaaagcctacggtgccggattatacgcgatggcggggcctgcttttgaaccggactgctgtttagcgcttccgactgcgcaaattgccgtaatgggtcctgaagcagcggtgaatgcggtctacgcaaacaaaatcagcgagctagcccctgaagaaaggccggcttttattcaagaaaagcgtgatgaatataaggaagacattaacctttaccggcttgcctctgaaatggtgattgacggcattgttcctgctgattccttgcgggaagaactcaataaacgcctcactgcttacatgtccaaacaactgacattcacacaccggaaacaccccgtatacccggtataaataaaaaagactgcatagatccggctcacagccgttcttatgcagtcttttttcacagtcttgatctcattttcttcacaacgaaataaacaacaataaatacgagagccaatataatgatcggagttgtatacattccggcatagctgtctacgtctttccactgtcccccgagctgatacccgagataaacgaaaatgacagaccacggaataatggcgagtgtcgtcaatatgacaaacttggaaagaggcattttcgcaaggccggcggggatggagatcgcatgtctgacgaccgggataaaccgcgccgagaacacaacaccggcgccgtaacggcgaaaccagttttccgcaacatcaacatgatgctttttcagaagtaagtacttgccgtacttgtccaaaaacggccgtcccccataacgggcgatccagtaaataaagcactgcgcgatcgttcccccgatcacaccggcgacaatggcgccgataaagctgatcgtgccttctgacaccatatagcctccgtaagccagaacgatttcactcggaatgatttcgatcattaatccgagcgcaatccctaaatagcccatacttgtcagccaggataatatttcactaataaaattgcccacactgttcacaacctctttatctttttacccaattatatgactgattgacaagcaaaatggttacaaattattttttaacgcacgatttcttcagattctctttttaacacctcttctaaataagctaaaagtttcggtctcatttcttcccgcagaagcccgatctccgtgccggccttaaaacagccgaacttatctcctatatcaaaccggcttccttcaagctcccgcgcgtaaatgcttcgggtgcggcacacttcgcgcagcgcgtctgtcaattggatttcgttgcccgcgcctcttccgatcgtcttcagcgttttaaaaatagcagggggttaatatgtagcggcccatcacggcaatatgagagggcgccttttcaacagccggtttctcaatcagatcctcaatctggtacacaagaccgctctgccgccccgtctgtataataccatatttgctgacatcagcaggatcgacgggctgtacgccgaccgtttctgtaccgtgttggttatagatgtctatgagctgtgaaagagcgggagtgtcagataccataatatcatcacctaagagaacggcaaaaggctcatctccgataaaatgctccgcacacagcaccgcatgtcctaatccgagcggttctttctgacgaatgtaatgaatattggccaaatcggcaatccgctgcatttccttcagcgtctccgtcttgcctttttcctcaagattgaattccaattccgccgaccggtcaaaatgatcttcaatcgagcgtttgtttctccctgtaataatcaatatatcttcaattcctgacgctgcggcctcttcgacaatatattggatggccggtttgtcgacaatcggcagcatttctttaggctgcgcctttgtcgccggcagaaatctcgttcctaaacctgctgcgggaatgaccgcttttctcactctttttttcattcatcttcactcctgatcctgtatgtttttcagcgaatctccaaatacccagattcggtttccgataaaattcatcatcattccgccgatagtggcagcgaacttactcaccaatagcgaacagccgcctttttgaaacgcgtaaagcagcaaaaaggtgattcccgacgcggcaagattaatcatgagaaatcgcatgatctctttcccgtcagccttgcgttttacacgaaacgtccacttccggttccatacatagctgttgatgatccctgccgaataggagcagatctgcgccggaagataggggacatgacaagcggcgagaagaaagaagacaccaaaatcgatcagcgtattgccgacgcctacagtgcaaaaacggcctgctgtctttactttttctttcagcataacggcatccggttttgacctcccttcataaaagaatcagatggctgtcatattcgttaatatggactactttagcggacagtgttgaataaacaattactaaaatatgaacaaaacatgaaaacgtaatgaggctttgcaaaactcattaagttaacagtttgatagtttaggttgacatattccgtagagggcactaatattctgtataagtgttaaccttttattaatttggttaacattaattttcaaagtaagagaaaggaggggaatatatgcaggaagagacctattacagcgtcagaatgagagcttcccaaaacgccccccatgagcagggcggaaaacacatttccggcggagaacggctcatcacttacggcggtttacaggaagcggtagatggcttattacataaaggcttctcgcactcaagagggatacctgattttatgcagattcagcttgaaagcattaatgaaccgatcgaaacgatccgccctctgccggttgctttccatcaaacagacacgccggaaaaaggacaagcaatcgcccgcaagcttctgcaaaaggcggggattcccccgcacatgatagagaaagcgtatgaaaacattgcggaatatgcagaagcaagaggagcggtcctgttcgatatacgggcaggaaaacgcattgacggcagaggaaatagaggtgtgcgggtatcccgagtggattggccgtcacatgattttcaaaaatgggcttttacgcacaacatgccggaaaattcacgaataaaagaagcacatgccatcgcggcaaaagtttgcgcatatccggggattattgctgaattgtgctggtcggatgaccctgattacataacaggctacgttgccgcaaagaagctgggatatcagcggattgccaagatgaaaaatgccggagatgaatgcggctgccggattttctttacagatggctccatagatacggagagctgtatccattttttagagaagcagcctgtattcattcagcgggaggagaaatgatgaaacaatcaatgattgaaaaaagcaaaaagcatctttggctgcctttcacacaaatgaaagattacgatgaagatccgttaatcattgaaagcggaaacgggatcatgctgaaagacatcagcggcaaagaatattatgacggcttttcttcagtatggctcaatgtacacggccaccgaaaaaaagaaatggatgaagcgattcaaaaacagcttgaaaaaatcgctcattcgaccttgctgggtatgacgaacgttcccgcaacagaacttgccgagatgctgacaggcatcacaccggaaaagctgacacgcgttttttactccgacagcggagcggaagcaatggaaatcgctctgaaaatggcctttcaatactggaaaaacatagggagacccgagaaacagacgtttatttctatgcagaacggctatcacggcgatacgatcggagctgtcagcgtcggctccattgaactcttccaccatgtgtacggcccgctgatgtttgaaagctacaaagctccgattccgtatgtatacagatctgaaagcggcgaccccgtacagtgccgggataaatgccttcacgcgctcgaacagctgcttgcaaagcaccacgaagagattgccgcacttacgattgaatcgatggtgcaaggcgcatccgggatgatcgtcatgcctgaaggctttctggcaggcgtacgaaagctgtgtacggcatatgatgtgttaatgatcgttgacgaagtggcgacggggtttggccgcaccggaaaaatgtttgcctgtgagcatgaaaatgtccagccggacttgatggcggcagggaaaggcattacgggaggctatttgccgatcgctgtgacgtttgccacagaagccatttatgaagccttctacgatgactacgacaaaatgaaaacatttttccacggccattcctatacaggaaatcagcttggctgtgccgcagcaattgaaaatctgcgtttattcgaatcagagcgcatcgttgaacaagtcgccgaaaaatcaaaaacggcagcggaatttcttcataatctgaagcagcttcctcatgtcggcgatgtccgccagctcggtttcatgtgcggcatagagcttgtgcaggataaggggacaagacagccttatctgcctgaaaagcggatgggatacaaggtgtccttgaaaatgagagagcttggtatgctgacacggccgctcggagacgtcatcgcctttctgccgccgcttgccagcacaaccgatcagttacaagccatgatctccattatgaaagaagcgatagccgaggtgaccggccgtggattttgacggatggctcctcggaaggctcgatgcggtgaaaagagacgggctgtatcggacgctgcgaacacaggaaaccgctctcaaaaccaaagggcaaaagcggcagacctgggcgtccaatgactatttaggcctgtcaaaagatgagcggcttatcacagccacgcaaacggcgctgagccggttcggagcgggaagcggcggctcaaggttaacaacaggaaatactgtgtggcacgaaaaacttgaacaaacaatcgcggactttaaacagacggaagcggctttattgttttcaagcggttacttggcgaatatcggcgtgcttgcctcactgcctcaaaaaggcgatgtcattttaagcgatcaactgaaccatgcgagcattgttgacggctgccgtttatcaaaagcggaaaccatcgtgtaccgccatattgatatggctgatcttgagaaaaaacttgcttccgtccaggctcggaaccgccgcttcatcgtcacagacggcgtcttcagcatggacggcaccatcgcgcctcttgaccgcataatggcgcttgcaaagcagtaccaggcatttgtgatagcagatgacgcgcatgcaaccggtgtactcggggaaaacggcgggggaaccagtgactatttcggtgtttgtccggatgttgtcatcggcacattaagcaaagctgtaggaacggaaggcggttttgccgcgggatcaaacattttcattgattttttgctgaatcaggcgcggacgtttatttttcagacggccctcccgccgtcaatttgtgcggcttcacatacggcatttgacatcatatcagatatgcacgatacgcgccgtgagctgcaatcgtctgtcaaaacgataaaaacgcgtctggccgatatgggctttaccgtaagaggcggagatacaccgattatccccgttatcatcggtgatgcaaaaacagcggtttcagccgctgcgctgctggagaaaaagggaatctgcgccccggccatccgcccgcccgccgttccggaaggcgaaagcagaatcaggctgaccgttacggcggatcgcagcttacaggacatagacgagctgacagaagcatttgattccattagaaaagagctgaatttaaacaaatgagaagtttttttgttacaggaacagataccggcgtcggaaaaaccatcgtttcttgcggacttgccgcggcattccggcagaaacaggcggatatcggagtgtttaagccgtttttaagcggcgtgccgcggactcatccggaaagtgacacctcgctcttgaaagacatgtcacaaaccgcactgtctcatgaagaaattacgccatttgaatggaaagagccgcttgcgccatacacggccgccatgcttgaggggaaatccgtgagcatggcggatgtcatggcccactggagtaagatcaaaaatcgtcatgagtgtttcatcgttgagggggcaggcggcatttccgtcccgcttggtgaaaattacttagtcagtgatctgataaaagccatggaattgccggcagtgattgtcaccaggcctgatctcggaaccatcaaccacacatatttaaccattgaatatgcgaaaaacatggggatagaggttctcggcattattatcaacggcgtaaagagccggccggggctggacgaaaagacgaacccgagcatgattgaaacattatgcaaagttccgattttgggaatcacaccgaagctggatcacgtttcaccggaaaacattcaacacatgattgagaaacatatagatgttacctctttcatgaatctgacacaaatggggagataaacatgaatcaatggatggatcttgcagagagagtgctggacggggcggaagtaacgaatcaagaagcgctggccattttaaattgtcctgatgaggatcttttattgctgatgcatgccgcttttcatatcagaaaacgattttacggaaaaaaagtaaagctgaatatgattatgaatgcaaaatcaggcctgtgtccggaaaattgcgggtactgttcacaatcttcaatatcaaaagcgccgatcgagtcttatcggatggtggataagcatatattgctaaagggggcaaaacgcgcccacgacctgaatatagggacatactgcatcgtcgccagcgggcggggaccgtcaaacagagaagtagatcaagttgttgatgctgtcaaagaaattaaagaaacgtacggtttaaaaatctgcgcatgcctcggtctgctgaagccggaacaggcagagcggctgaaacaggcaggagtagaccggtacaatcataacatcaatacatcacaaaggaatcactcaaacattacgacctcccacacgtatgacgacagggtcaatacagtggaaacggcgaaacaatcggggatgtcaccttgttctggtgtcatcgtcggcatgaaagagacgaaacaggacgtcattgatatggcgaacagcttaaaagcgcttgacgccgacagcatcccggttaattttctgcatgcgattgacggaactccgttagaaggggtaagcgaattacatccggtgtattgcctgaaagtgctcgccttgttccgttttatcaatccgtcaaaagaaatccgtatctcaggaggccgggaagtcaaccttcgttcgctgcagccgctgggactttatgccgcaaattcgattttcgtcggagattacttaacgacagcagggcagcatgaaacagaggatcatcaaatgcttcatgatttaggttttgaagtcgaatccgttgaagaaatgaaagccggcctgcaatccgcctgcaatacggaggtatgagatgacggcaggcctatcgattgcacatccgtctctccatgcggattcggatttttggaatgacccttacccattttatgacaaactgcgatccattgatcctgtttataaaggaaccgtattaaaatatccgggctggtatgtcaccgggtacaaagaagcggcagcgattctgaaagacacccggtttaaaaaccgcattcctcttccggaagcttcaacgaaatatcaaaatctatcgcatatccagcacgatatgctgttatttaaaaatcaatcagaccataaacggatgcggatgcttatcggtaaagaatttaccgcaaagacggcggaatcacttcgcccctgtataaacgaaacggttcatgacttgttggatcaagtccaaatcaaaaaaaacgctgaccttgtttcagagtttgcctttccattggcaagccttatcattgcggagatactcggagtgccgaaagaggagagatatcaattcagacaatggacggcagacgtcattcaggccattgatcttacccgatcaagaaagacgttagtcagagcaagcgacaccgcaggcaggctcacgtcatatttcagagatttgattcacaagcggaaagctcaccctcagcaagacttgatcagcaggtttattatggaggaacagctttcaaaagaggaagtgctcgcgacatgtatcttacttgtcatagccggacacgagacgacggtaaacctcataagcaacggtgtgtttactttattgaaacaccctgaacagcttagcgcactgagagaaaacccctcgcttattgaaactgcagttgaggaatgtttgcgctacgacagccccgcgcagctgacggcacgcaccgcctcagaagactgcgaaataaatgggaagaccataaaaaaaggagagcaggtatatatccttttaggtgcagccaatcgcgatccaagcatattcgatcagcctcacaaaatggatatccaaagaaaaccgaatccgcatcttgcattcggaaagaacgcccatttttgcataggctcctcattagcgcgcatcgaagcacaaattgcaattctcacactgtttgagcggatgcctaaacttcggctggccgcacaccgccttgaataccgcaagctcattggttttaggtcgctcaaagagcttccggttgttattggctgaatggaccatgcaggagggccggattttatcggttcctcttgcaggaaataaatgaaagaaaaaagaatacatatttataaagcaaaaatcctctctgatccatctcactatccctaaaaaaactcactgctcagccaatcaatataatgcagcaagggtctccttttctttcgccaaaacggagaattcaccataatgcacattttttcagcctcaaaaactgtgcaaaaccggcatgtttttgctttattttctcgatttttgtaagcgcttactaacattgagcagaaaagagggggatttgtggacattgttattattttattggcattaggcatgctgatgtttgcggcttaccggggcttttcagtcattttattcgccccgatttgcgcgctgtttgccgtgctcctgacagatccaagcttcgtgcttcctttcttctcgaatatatttatggagaagatggtaggatttattaagctgtattttcccgtatttcttttaggggccgtttttggcaaggttgttgaaatctcggggctcgctgagtcgattgcaaaaacaatcgtcaagcttgtgggagcaaaaagagccattctcgccatcgtcttaatgggtgcgattttaacgtacagcggcgtcagtctcttcgtagcggtgtttgccatctatccgtttgctaaaaacctatttatcaaagctgatattcccaagcgtctgatacccggtacgattgcattaggcgcctttacatttacaatggatgcgcttcccggcacaccgcaaattcaaaatgtcattccgaccgctttttttaaaacaaacatttatgccgctccctggctcggactgattggtgcagcatttgtgcttacggccggaatgatttatttagaatcccggcgcaaaaaagcggccaatgccggagaaggctatgctggatttcaatctgaagtttccgctgcagaggaatcctcgggtctggctaatgaaaaacatacgcctgttttaccgcaggaggcagaacccagccccgcgcggcaagtgctcgcctttgttccgcttatccttgtgggggtcatgaacaaatgcttcacgatgtggctcccgcattggtaccctgacggatttgattttgcgccgctcggcttagaagcgttcgggaaaattgacctttcctccgtcactgcgatctggtcagtagaactcgcactgttcatcggaatcatgacaacgattttgttcgattggaaaaaagtcctcttcaatttgaaagaaggactgaatgagggcatcgggggcgccttgctggcgtcgatgaatacaggagccgaatacggatttggcggcatcattgcggcgcttcccggctttaaaatggtcagcagcggcatatcgcagacgtttactgatccgctcgtcaacggagcggtgacgaccactgcgcttgccgggattacaggatcggcatcaggaggaatgggcatcgctttaagcacgatgtcagcagcgtatacagaagcaatcaatacattccacatcccgccggaggtcatgcaccgggtgatctcgatggcctccggcgggatggacactcttccgcataatggcgccgtcattacgctgctcgcggtcaccgggttgacccaccgccaatcctacagggatatctttgccattaccgtcattaaaacagccgctgtgtttgtcatcatcgccatttacagtctgacgggccttgtgtagccaaaacagaaaggggaaacgaatatgggaataggaaaagtgatggactcttatcaagatgctgctgcactgatcaaggacggagacaccctcatcgcaggaggcttcggcctgtgcggtattccggaacaattaattctcgcgatcagggacagcggcgtaaaaaacttgaccgttgtcagtaataactgcggtgttgatgattggggtttaggcctcttgcttgcaaaccggcagatcaaaaaaatggtcgcatcctatgtgggagaaaacaaaacctttgaacggcagtttttaagcggggagctggaagtcgaattggtgccccaaggaacgctcgcagaaagaattcgcgcgggaggggcgggcattccggcgttttatacacctgcgggcgtcggaacatcagtagccgagggaaaagaacataagacatttgacgggcgcacctatcttctggagaaagggattacagggaacgccgccatcgtaaaggcctggaaagccgatcctctgggcaacctgatgttcagaaagacggcaagaaatttcaatccgctcgctgcaatggcaggcaaagtgacgattgcagaggctgaagaaatcgtcgatgccggagagcttgatccggatcaaattcatacgccgggtatttttgtgcagcacgtgctgctcggcgggattcatgaaaaacggattgaacgccgcaccgtccggcaagcatgataaaggaggctgacagaatgagagatagcagaaaacgaatgatcaaacgggctgtaaaggaaattaaggacggaatgaatgtgaacttggggatagggaggccgacgcttgtagccaatgagataccgaatgattataacgtcctgcttcagtctgaaaacggcttgctcgggatcgggccttatccggcggaaggaacggaggaccccgatctgatcaatgcgggaaaagaaaccattaccgaggtaaagggagcctcgtattttgacagtgccgaatcctttgccatgattcgcggcggccacattgatgtagcgatcctcggcgggatggaagtgtccgaacggggagatttggcgaactggatgatcccaggaaaaatgatcaaaggaatgggcggcgcaatggacctagtccacggagcaaaacggattattgtcattatggagcacgttaataaatatggggaatctaaagtgagaacggaatgtacgctgcctttaaccggcaggcaggtggtcgatcggctgatcacagatttggctgtattcgattttcatgatggccgtatgacgctcaccgaactgcaggaaggtgtaactatggaggaggtctttgagaaaacagaaggtcattttactgtcagccagtcgttaaaaaacggagtcagaccaaaatgaggaggcgccgtcatgcattcattgcttattgaaaaaacagccgttgtaacaggagcagccggaggaatcgggcttgaaatcgcaaaagaattcgcccgtgaaggagcagccgtcatcatctctgatgtaaacgaacaagcggggaaagaagcggcggcaagactgacagatgaaggctgtgaagcagtcagcatcacatgcgatgtaacaaatgaaaagcaagtggccgacatgctgcagacggtcgagaaacaatacggacgtctcgatatccttgtgaataatgccggcattcagcatgtcgcgcccatcgaggaatttcccaccgaacagtttgaacggctcattcgtctcatgctgaccgcgccatttatcgcaatgaagcatgcatttcccatgatgaaaaaacagcaattcggtcgaatcattaatatggcgtctgtcaacggactgatcggttttcacgggaaagcggcatataacagcgccaagcacggcgtcatcggtttaacgaaagtcggcgcacttgaaggcgcggctgacggcattaccgtcaatgcgctttgtccgggatatgtggacactcagcttgtccgcaatcagttaaaggacatttccgcaacaaggaatgtaccgtacgagcgggtgcttgaggacgtcatctttccgctcgttccccaaaaacggctgctgtcagtgaaggaaatcgctgattacgccgtatttttgtccagcgacaaagcaaaaggggtcacaggtcaggccgtagtcatggatggcgggtataccgctcaatagttctaatacttttttaaaaaacagccgctctgaacggctgttttttatgcctgaaaaccttgttcactcaataggccgattactgcgtcaatcggtatccgggcagggtcatttccatgttctgcggcgtatttcgcccttgcggattttccccatccagatccatctcttgcgccgcatttataatcaagcgcaatcagtttacaatccttcacagatatacaaatgaatttttacaataaacagaaaatatgtaatttctgacacaataatgccaatagccctaaaacatatgaaacatgaagagcgcgttctaagtgaagaagagccggtaacaggctccactccggctttcatcatctctctttaagactgattttcggtgaaacccccatgttttattttatgaataaatatatctaattcgtttgtgaaaacgaacaataactcctccgaaagtattctatacacatttgttataatcatgctaggatgttatataaagggatattttgtaggatattgtatcccttgttcaatatgatcggaggaatctcatgaacaatcttgcctttttatttcctggacaagggtctcaatttgtaggaatgggcaaacaattttggaatgattttgtgctcgcaaagagattgtttgaagaagcgagcgatgcgatctccttggatgtaaaaaaactgtgttttaacggagatatgaatgaattgacaaagacaatgaacgcgcagcccgctattttaacggtcagtgtcattgcttttcaagtgtatatgcaggaaataggggtgaagccacgcttcctggcaggccatagcttaggcgaatattcagcgcttgtctgtgccggcgccctttcttttcaggatgccgttacacttgtaagggagcggggaattcttatgcaaaatgcggatcctcagcagcagggggcgatggccgccgtgactcacctctctcttcaaaccttgcaagaaatatgttcgaaagtgtcgacggaagactttccggcaggtgtagcctgcatgaattcagaacagcagcatgtgatttccggacaccggcaagctgtggaacgtgtcatcaagatggcggaggaaaagggtgcggcatacacttatttgaatgtcagtgcgccttttcacagtcagatggtacgatcagcatctgaacaattccagactgtattacaccggtattccttccgggatgccgcatggccgatcatttcaaatgtcaccgcacgcccttacagcagcggaaattcgatccgcgaacatctcaagcagcacatgacgatgccggttagatggacagaatcgatgcattacttgcttttacatggagtcacagaagtcatcgaaatgggtccgaacaatgtcttagccggtctgctgagaaaaacaacgaatcacattgtaccttatcccttaggacagacatctgatgttcccccgctttccaattcagcggaaagaaagaaacatattgtccatttacgcaaaaaacaactaaataaattgatgattcaatccgtcattgcgcgaaattacaacaaggattcagcggcttattccaatatgacgacgccattatttacgcaaatccaagagctgaaagagagaatgaaaaggcatgaagatgtgctttcagaacaagaactcgaacattcgatccatttatgcaaattaatttgtgaagctaaacagcttccggcttgggaagaattgcggattttaaaataaagcgcccaggaggggacctatgtataccagtcaattccaaaccttagtagatgtcattcgggaaagaagcaatatctctgatcgcgggatccgttttatcgaatccgataaaaacgagacggttgtctcttatcgccaattgtttgaagaggcgcaagggtatcttggctatttacagcatctcggcattaagccgaagcaggaaattgtatttcaaatccgagaaaataaatcatttgtcgttgctttttgggcttgtatattaggaggaatgatcccggtgccggtcagtatcggagaagatgatgaccataagctgaaggtctggcgcatttggaatatattaaatcatccgtttctgattgcctctgaaaaagtattggacaaaataaagaaatacgctgcagaacacgatttacaggatttccatcatcaattaaacgaaaaatctgacatcattcaagatcaaacctacgattaccccgcttcattttatgaacctgatgcggatgaactcgcctttatccaattttcttctggatcaacaggagatccaaaaggagtcatgttaacgcatcacaacttaatacataacacgtgcgccattgggactgccctacacgttcattcgaaagactctttcttatcatggatgcctttaacgcatgatatggggctcatcgcctgccaccttgttcccttcataaccggaatcaatcaaaatctaatgcctacagagttatttattcgaagacctattctttggatgaaaaaagctcatgaacacaaagccagtattctatcatctcctaatttcgggtacaactacttccttaaatttctgaaaaacgaaccagactgggatttatcacacatcaaggtcatcgcaaacggtgcagaaccgatattgccggagctgtgtgacgaatttttgaaaagatgcgcagcattcaatctgaaaagatccgctattttgaatgtttacggtttagcggaagcttcggttggcgcagcgttctctaaaataggtaaagaattcgttcccgtttatttgcatcgtgactatttaaatcttggtgaaagagctgtaaaagtcagcaaagaggaccaaaattgcgcttcattcgttgaagtgggacaacctattgactattgtcagcttcggatctccgatgaaacaaatgaaagagtagaagacggaatcatcggccatatccacatcaaaggagacaatgtgacgcaagggtattataacaacccagagagtacggaaaaagcgctgacttctgacggctgggtaaaaacgggagacctcggattcattagtgaaagtggtaacttagtcgtaaccggaagagaaaaggacattattttcgtgaacggaaaaaatatctacccgcacgatattgaacgggtcgcgattgaaatggaagaggttgacttaggaagggttgccgcctgcggtgtatatgatcaaaagacgcaaagcggagaaatcgtgctctttgttgtttacaaaaaatcacctgaaaaatttgcaccgcttgtcaaagagataaaaaaacatttgtacaagcggggcggctggagcataaaagaagtccttccgatccgaaaactccctaaaacaaccagcggaaaggttaaacgctacgaacttgccagacagtatgaggcagggaatttttcaacagagtctgccgccatcaatgaatgtttggagagcagcacggaaacatccggacagacacccattcatgagatagaaacggaattgctgtctatcttttccgaagtgctcgatggaaaaaaggttcacctcgctgacagttattttgatatgggagcaaattcattacagttatcgcagattgccgagcgcatagaacagaaattcggacgcaagcttgccgtttcagatctctttacgtatccttctatcactgatttagcggcatatctgtctgaaagccgggctgaaatcaagcaggacgcggcagcgaaaccaagccatgtgacaccgaaagatatcgccattatcgggatgtcgctcaatgtcccgggagcgtcaacgaaaagtgatttttggaatctgcttgaaaaaggtgagcacagcattcgagaataccccgaatcccggctgaaagatgcggcggattatttaaagtccatccaaagcgagttcaatgagagtcagtttgtgaagggcggctatttagatgaaatcgaccgctttgactattcgttcttcagtttagctcctaaagcggctcagtttatggaccctaaccaaagactgtttttgcagtctgcatggcatgcgattgaagatgcgggctatgccggcggcagcatgaacgggagccgtgtcggggtatatgcggggtactcgaaggtgggctacgattatgaacgtctcctttctgcgaattatccggatgaacttcatcaatatatcgtgggcaatctcccttccgtgctagccagccgaatcgcttatttcttaaatttaaaagggccggcggtcacagtggatacggcatgctcctcatcgcttgccgccgttcatatggcatgtaaatctttaatgtccggcgattgtgaaatggctcttgccggcggtatccggacatcgctcttgccgatctgtatcggacttgatatggaatcttcggacgggtacacgaaaacgttcagcaaagattcagacggcacgggcacaggtgaaggcgcggccgcagtcctgctaaaacctttgcaggatgctgttcgcgacggagaccatatttacggcgtaatcaagggaagcgcgctgaatcaagacggaacaaccgccgggattacagcaccgaatccggcagctcagactgaggtcattgagacggcctggaaagacgcgggcattgctcctgaaacactgtctttcatcgaagcgcatggcaccggaacgaagctcggcgatccggttgaatttaacgggctttgtaaagcgtttgaaaagtatacggcaaaaaaacaattttgtgcgattggttctgttaaatcgaacatcggccatttgtttgaagcggcaggcatcgtcgggctgatcaaatctgtcctcatgctgaatcacaagaaaaatccgccgttagcgcactttaatgaacctaatccgctcattcattttcactcatcaccattttatgtgaatcaggaagtttcggagttcacatcgggtgatgagccgctgcgaggcggagtcagctcatttggctttagcggaacgaacgctcatgtggtattggaagaatatatttctcaaagtgagtatgcacccgaggatgaacatgggccgcacctatttgttttatccgctcatactgaaaagtcactctatgaactcgcacagcagtaccggcaatatgtatcggatgacagccaagcttcattaaagtccatttgctatacagccagtacgggcagggctcatttggatcatggcattgccatgattgtatccggtaagcaagaattatcggataagctgtcccgcctgattcagggagacagaaaccttcccggtgtatacatcggttacaagaatatgaaggaaatgctgcctgctcataaagaagagctgaatcaacaagcagccgctctgattaagcagcgtttacgtacgcaagatgaacggatcacatggctgcatcgcgcagccgaattatttgtgcaaggagccgttatcgattggcgcgcgctttattccggtgaaactgtacaaaagacgccattgcccctgtatccgtttgaacggagccgatgctgggctgaagctgaccagttgcgcttaaacgagggcgaaaagagaggagaagcggcattgaatatcaatcaatcgaaggcgcatattgaatccttcctgaaaactgtaatcagcaatgcttcggggatcaggggagaggaactcgatctgaatgctcattttatcgggctcggaatggattctatcatgctgtcacagatcaaaaaagccatcgcggacgaatttggggtagatatcccgatggatcgtttttttgatacgttgaccaaccttcaaagtgtcatagattacttggctgatatcgttccatcgtccattgcatccgctccgcctcaagagaatgttccggcgcaggaaaaacaggtcatttcagaagcgcagcctgaatcggatcgcagagatggtcatcaagagcatacgctcgaaaaaataatcgcatctcaaaatcaattaattcaggatgccttgcaagctcaattaaatagctttaatttgctgagaaacagcggacatcattccgatgagaaagaatacgctaaagcgcaagagaaatcaattccttctgtcaagcaggggcctccgaccgtcactgcagaacagaaagcggctcaagaagcgaaaccctatgttcctttccagcctcagaacctgaatgatcagggacactataccgcacggcaaaaacaatacttagaagatttcatcaagaaatacgcagataaaacgaaaggttccaaacaatatacggacaacacccgatttgctcatgcaaacaaccgcaatttgtccagcttccgttcgtattggaaggaaatcgtatacccgattatcgccgaacgttctgacggttctaaaatgtgggatattgacggaaatgaatatatcgatatcaccatgggattcggggttaaccttttcgggcatcatccttcctttattacacaggttatcgatgattcaacccgttcatcattgcctccgctcggcccgatgtcagatgtcgccggtgaagttgccgaccggatccgcacatgtaccggagtggaaagggtcgctttctataattccggaacagaggccgtcatggttgccctgcgtttggcgcgggcggcaacaggaagaaagaaagtcgtggcgttctcaggatcttatcacgggacgtttgacggcgtattaggggttgccggcacaaaaggcggggctgcgtctgcgaatccgctggctccgggcatattgcagagctttatggatgatttgattattttacattacaacaatcccgattcgctggatgtgatccgcagtcttggtgatgaattggcagccgtactggtggaaccggtacaaagccgcagaccggatttgcagccgcaggcatttttgaaagaattgcgggcgatcacgcagcaatccggaacagctctgattatggatgaaattattaccggatttcggatcggtcttggcggcgcacaggaatggttcggcattcaggctgatttagtgacctacggaaaaatcatcggcggcggacagccgttaggggtagttgccggaaaagctgagttcatgaatgcgatcgacgggggtacctggcagtatggggacgattcctacccgcaagacgaggcgaaacgcacgtttgtggccggcaccttcaatactcacccgcttaccatgaggatgtcattagccgtccttcgccatttacaaaccgagggagaacatctgtatgagcagcttaatcaaaaaacagcctacctggtcgatgagctgaatcgctgcttcgaacaagcgcaagtgcctatccgcatggttcgattcggttctttattccggtttgtctcatcgcttgataatgacttgttcttttaccatctcaactataaaggggtctatgtatgggagggacgcaactgcttcttgtctgcggcgcataccgcggatgatatcgaaaatattattcaagcggtgaaagacacggtggaggatcttcgccgaggcggatttattccggaaggcccggattcccctgatggcggaggccgtaaaaagtccgggacgcgcgagctttcacctgaacaaaagcagttggttatggcatcccattacgggaatgaagcttccgccgctttaaaccagtccattatgctgaaagtgaagggcgaactgcagtatacatcattaaaacaagccgtccggcatatcgttgaccgtcatgaagctttacgtacggtgattcatcccgatgacgaggtacagcaagtgcaggaacggatgaatatagaaatacctgtcattgattttaccggtctcccgcatgaacatcgggagccggaaatccaaaaatggctgacagaagattccaagcggcagtttcatttccatgaacaaaagcctttgtttagaatccatgtgcttacatcggctcacaatgaacatctgattgtgctcacgttccatcatatcattgccgatggatggtcaatcgccgtttttgttcaagaactggagagcaactacgcggcaatagtacaaggaaaatcgatttcaccgaaagaggcagatgtttcgtttcgccaatacttagactggcagcaggcacagatcgacagcggccagtatgaagaaggggtccgttattggcggcgtcatttctctgaaccgatacagcagccaattctgccaaccgcagattctgtccgttatccgaacgggtatgagggagaccggtgtaccgtcaggcttggacggccattgagcgaggctttaagatcattaagcattcagatgaaaaatagcgtatttgtgacgatgctgggcgcatttcatctttttctgcaccggcttaccaaacagtcaggccttgcgatcgggatccccgctgcaggtcaatcgcatatgaaacagcatgatctgattggaaattgcgtcaatatgattccggtgaagaacacgtcttcttcagaaagcactttatccggttatcttggcagcatgaaagaaagcgtgaatcttgcaatgcagcaccaagccgtcccgatgacactggtggccagagagcttccgcacgatcaaatgccggatatgcgtattatctttaatttagacagaccttttcgaaagctgtatttcggaaaggcggaggcggagcctgttgcatacccggtaaaacgcaccctgtacgatttatttcttaacataacagacgcgcatcaagaatatgttcttgatttcgactttaatacgaacgtcgtcagtccggaaatcatgaaaaagtggggagcgggttttacaaaattgctgcaaaaaatggttgagggagattcaatccctcttgacgccatgatgatgttttccgatgaagaacagcatgatttacaagcactttacgccgaacaccagaagcggatcgcttcaataggaagcaatacggcaaattttactgaagcctacgaggcgccggtaaatgaaacggagcggcagctggcgcggatttgggaggaacttttcggccttgaacgggtcggcagatcagaccgcttcctggctctgggaggaaactcactccaggcgacgcttatgctttccaaagttcagaagacatttcatcaaaaggtttccatcggacaatttttcaatcaccagactgttaaggaattagcacgtttcattcagaacgaaacgaaagtcgtgcacctcccgatgaaggctgccgagaaaaaagcgtattacccgacatcgccggcgcagcaaagagtatatttcctgcaccaactggaaccggatcagctggcgcaaaatatgttcggccacatatcaataacagggaagtacgatgagcaagccctgatctcatctcttcaacaagtgatgcagcggcacgaagcgtttcgcacgtatttcgacattatagatggcgatatcgttcagaaacttgaaaacgaagttgattttaacgttcatgtccggacaatgagccgggatgaatttgatgcctattcagaccggtttgtaaaaccgttccgcctggaccaagctccgttagttcgtgcggagctgatcaagattgaaaacgagcaggccgaactgctcatcgatatgcatcatatcatttcggacggttattccgtcaacatccttacaaatgaattgctggctttatatcatcagaaaccattaccggacattgaatttgaatataaagatttcgcagaatggcaaaaccaacggatgaatgacgatgccatgaagcggcaggagacatattggctggaacaatttcaagacgaaattcccatccttgacctgccgacagacggttcaaaagcggcagaacggtcttctgagggacagcgtgtgacatgctccttacagccggatgtcatccgttcgcttcaagacttggcacaaaaggcggaaacgactctctatacggtgcttctggccgcctataatgtgctgcttcataaatatacgggacaagaagacattgtcgttggcacgcctgcttcaggaagaaatcatccggatatcgaaaagatcatcggtattttcatacaaaccattggaatccggacgaagccgcacgccaatagaacgtttacggattatctggaagaagtaaagcggcagacgcttgacgctttcgaaaaccaagactatccattcgaccggcttgtggagaaattaaatgtacagcgggaaacaaccggaaagtctctgtttaacacgatgtttgtgtttcaaaacattgaatttcatgaaatccggcacaatgaatgtacatttaaagtgaaagaacgaaatccaggggtctctttatatgatttgatgctcacgatcgaagatgccggtcaacagatagagatgcattttgattatagaccgggacgattcacaaaagacaccattgaacagatcaccagacactataccgccattttaaacagccttgctgagcagccggagatgacattgtcttctgttcctatgctgtctgaaaccgaacgtcatcaactgctgacggagtgtaatggcacaaagacgccgtatccgcataaggaaacggtatatcggtggtttgaaatgcaggcggaacagagtcccgatcatgaagccgttatttttggcaatgagcgttatacgtacagacagctcaatgaacgggcgaaccgattggcgcggacgttacggacaaaaggcgtacaagcggatcaattcgttgccatcatcagcccgcatcggatcgagctgattgtcggaattttggctgttctgaaagccggcggcgcatacgtgcccattgatcctgaatatccggaagatcggattcaatatatgctgagagattcaagagcggaggttgtgttgacacagcgcagcctgctggatcaattaccgtatgatggtgacattgtgcttttggatgaggaaaactcataccatgaagatcactcgaatcttgaatcggacagcgatgcgcatgatttggcctacatgatctatacgtcaggttccacgggaaatccaaaaggtgtactcattgagcatcaggggctggctgattatatttggtgggcgaaagaggtttatgtaagaggtgagaaaaccaacttcccattatactcttccatctctttcgatctgactgtgacctcgatatttacaccgctggttacgggaaataccatcattgtctttgacggcgaagacaaaagcgctgtgctttctgagattatgcgggactcaagaatagacatgatcaaattgaccccggcacatctgcacgtcatcaaggagatgaatatcgctggcggcaccgcaatacggaaaatgattgtcggcggagaaaatttaagcacccgtctggccaaaagtgtcagcgaacagtttaaaggccggctggacattttcaatgaatacggaccgacggaagctgtcgtcggatgtatgatttatcacttcgacgcagaacgggacaagcgggaatttgtaccgatcggcactccggctgccaacacggatatttatgtggccgatgcaagcagaaacctggttccgatcggggtaatcggcgaaatatatatcagcggaccgggtgttgccagagggtattggaaccgcccggatttaacggcagagaaatttgttgaaaacccgtatgtaccgggagcgaagatgtacaaatcaggggatttggctaagcgattgaaggacggaaatctcgtatatattgggcgcgttgatgaacaagtcaaaatcaggggacaccgaatcgagcttggtgaaattgaagcagcaatgcataacgcggaagcggtgcaaaaagccgcggttacagtgaaagaagaagaagacggcttaaaacaattatgcgcgtattacgtaagcgacaagcctatagcggctgcgcagcttagggaacaattgtcatcgcagcttccggactacatggttccgacctattttgtccatctggagcatatgccgttaacatccaacgggaaaataaaccgtaaggcactgcctgcaccggaagcgagtctgcagcagacagctgaatatgttccgccgggtaatgagacggagtccaaactgacagatttatggaaggaagtgctcggaataagccatgcggggatcaaacataatttctttgatctcggaggcaactccatccgagcggctgccttagccgccagaattcacaaagagctgaatgtgaatctgtctctcaaagacatattcaagtttcctaccattgaacaattggctgacaaggcgttacacatggacaaaaatcgatatgtaccgattccggctgcaaaggaaatgccatattatccggtttcttcagctcagaggcggatgtatttgttaagtcacacagaaggcggcgagctgacttacaatatgacgggtgccatgaatgtggaagggacgatcgatcccgaacggttaaacgccgctttccgaaaattaatcgcgcgtcatgaagcgctgcggaccagctttgatttatatgaaggcgagccggcacagcgtattcatcatcacgtcgactttacgatagaacgaattcaagctagcaaagaagaggcggaagaccgtgtgcttgatttcatcaaagcgtttgacttagccaaaccgccgctgatgcgggccggactgattgaaattgaacctgcgcggcacgtgcttgtggttgatatgcatcatatcatttctgacggcgtgtccgtcaatattctgatgaaagatttaagccgaatctacgaggggaacgaaccggacccgctctctattcaatataaagactttgcagtttggcagcaatcggacattcagaaacggaacatcaagaaccaggaagcgtattggctggatcagtttcacggtgatattcctgtactggatattcccgcggattatgagagacctgccatacgcgattacgaaggcgaatcatttgaatttcttatacccgaacacttaaaacagcgtttaagccaaatggaagaagacacaggagcaacactgtatatgattttattggcagcctatacgattcttttatccaaatacagcggacaagaagatattatcgtaggaacgccgtctgccgggcggactcatttagatgtagagccggtcgtgggaatgttcgtcaatacgttagtcattcgcaatcacccggcgggccgtaaaacatttgatgcctacttaaatgaagtaaaagaaaacatgctgaacgcttataaaaatcaagactatccattggaagaattaattcagcatctgcatcttccaaaagattcaagccgcaatcctttattcgatacgatgtttgtgctgcaaaatcttgatcatgctgaattgactttcgattcccttcaactcaagccgtatccatttcatcatccggttgccaaattcgatttgaccttgtcgattcaggcggaccgcgacaactatcacggactgtttgaatattcgaaaaaactgtttaagaaaagcagaatcgaggttttatcaaacgactacttacacatcctatcggcgattttggaacagccaagcattctaatcgaacatatcggattgagcggcagcaatgaggaagaagagaacgcgcttgattctattcaattgaacttttagggaaaagcattatttctttaaaatatataaaatgaggtgctccaatgtcggtatttaaaactcaagaaacgtactgggaaaacctgtttgatgaagaagacggcctaagcgcattcccttactttaaagcagcggataaagcgtcgttggcccgtaccggctaccaggaaaaatgcatctgccgttccttatctccggaagtatctcaaagaatcatgacaatggcgaatcattccgatatggcggcctatctgattttattggcgggtattgaatgcttgttgtataaatatacggatcgaacgagcctgattcttggcattccaacggtatcgaagcaaaaagccggtcagtcagccgttaacaacattgttctcttaaaaaatacgctttcaaacgagagcacatttaaaaccgtattcgggcagctgaaagaagccgttaatgattctctgaaaaatcaaaacctgccgtttagaaaaatggtccggcatttaagcgtgcaatacaatgacgagcatatgcctttgattcataccgtcgtttcgcttaacgaaattcattccttgcaatttaaagaagatactgcaaccgatacgctgtttcactttgacttggagaacaacgggattcatttgaagcttttttataacggcaatctgtacgatgagcgctatattaatcaaattgtatcccatttggatcagctgctgtctgtgattctgtttcagcctcaagccgcgatccatacggcagagatcttaccggaagcggaaaaacagaagctattgtttgattttaacgacaccggcacagatttctccgggagcagaacagtctatcaattatttgaagagcaagcagaaagaacgcctgagcatacggccgtcaagtttaaaaacgaccatttgacgtacagggaactgaatgagaaggcgaaccgtttggcaagaacattgcgtaattgcggggttcaacccgatacgttagtcgccattctcgctgatcgttcattagaaatgatcgtatccattatagccgtttggaaggcagggggcgcttatgtgcccctggatcctgaatatccaaaagagcggcttcaatatttgcttcatgatgcggatgcagacgttctccttgttcagcaacatttaaaaaacagcctcgcctttgacggccgggtgattgatttgaatgatgaaacatcataccatgccgattgctcattgttatcaccaatagcggaacacagccatttagcctatgtcatttatacgtcgggtacaacaggaaagccgaaaggggtcatggttgaacacggcggcattgtgaattcgctccaatggaagaaggcgtttttcaagcattctccggcggatcgcgtgcttgtcttgtacccgtatgtttttgatgcgttcattttaaacttcttcggcccgctcatctcaggagcaactttgcaccttttgcctaatgaagagaataaagaaactttcgccattcaaaatgccataaaacaagagagaattactcatttttcaacttctccccgtcttctgaaaacgatgattgaacagatgaacgcagaggatttcatccatgttcagcatgttgttgtaggcggtgagcagctggaaacagatacagttgagaagctgcattctctgcagcctcgcattcggatcaataatgaatacggaccgacagaaaacagcgtggtatctacatttcaccctgttcagtccgctgatgaacagatcacaatcggcagcccggtggccaaccatcaagcttatattttaggagcgcaccatcaaatccagccgatcggcgtaccgggagagctgtatgtcggaggagcgggagtggcccgcggctacctcaatcgggctgaattgacggaggaaaaatttgtggagcatctgcatgtccctggtcaaaagatgtataaaacgggggatctcgccagatggctgccggatggaagaatcgaatatttagggcggattgatcatcaagtgaaaattcgcggctaccggattgagatcggcgaggtagaggcagccatgttcaatctggaaaacgttcgtgaagccgcagtcgtcgcgcgggaagacgcagacggggccaaacaattgtatgcctattatgtcggcgagccttctttgaccgctgcgcagttcagagaagacttatcccgagaactgccgaattatatgattccctcccgctttatccctttggaacgcattccgctcacttcaaatgggaagattgatctgaaagctttgcctgctgctgacgaaaatacgcgggcggaatacgaatacatagccccgcggaacacaatagaagaactgctggtgtccatctggcaagaagtattaggggcagaacgtataggaatttcggataatttctttgattttggcggagattcgattaaatcaattcaggtgtcatccagattgtatcaagccggatacaaggttgatatgaagcatttgtttaaacacccctcgattgctgaacttagtcagtttgtagcgccggtcagcagggtggctgatcaaggagaagtgaatggcggaaccaagctgaccccgatacagcattggttttttgagcaaaaaatgccgcatgcacaccattacaatcaggccgtcatgttatattcggcggaaggctttaaagaggctccgcttcgccggacgatggaacggatcgcgtcgcatcacgatgccttgaggatgatttttgaaaaaacgccggatggatatgctccgcgaattacaggaacagatgaaagtaaactataccatctggaagtgatgaattataaaggggaaaccgatccggctcaagcgattgccgataaagcgaatgagattcaaagcagcatggtattagacaaagggccattgatgaagctcggtttgttccaatgtccggacggggatcatttgctgattgcaattcatcatttgctgattgacggagtatcctggcgtattttactcgaagattttgcaagcggatatgagcaggcagaacgcggacaaacaatccagctcccgcaaaaaacagactcgtttccattctgggccgatcaattgtccaaatatgcggcggaaaccgatatggaagaggagattgcgtattggactgagctttcaagtataaagcctcagccattgcctaaggacactatcagcgaaggatcgttattaagagacagcgaagaagtgacgattcaatggacaaaagaggaaacggagcaattattaaaacatgcgaaccgcgcctacaacacggatatcaacgatctgctgctgacttcgttagggctggctgttcacaagtggacaggcacggaagacattgtcgtaaatttggaaggccatgggagagaaccgattattccggatgctgacatttcccgcacgataggatggttcacaagccagtaccctgtcgtcctgaggatggaagccggaaaaaacctgtcgcagcggataaagatcgtaaaagaagggctgcgccgcatccctgacaaaggaatgaattacagcatcatcaaatatatatccgggcatccggaagccgacagcctgcagctgaatccggagatatcgtttaactatttgggacaatttgaccaagacctgaagcaccaggctttacgcatctcgcctttttccacagggttatcaatgaacgaaaaccaagagagaacggccgtgcttgatttgaacggcatgattgccgaagggacattatcactgacactgagctacagcagcaaacaatacgaaagatctactatggcgcaatttgcccgggggctgaaagaaagtctgcaagaagtcattgcgcattgcgtgagccggcagcagacttctctcacaccaagtgacatcctgttaaaagacatctcaatcgatgaactggaacagcttttggagcagacgcgtgaattaggcgaagcggaaaatatttatccattaacgccgatgcagaagggcatgctgtttcacagcttatttgatccgaattcaggtgcttattttcagcaaacgatgtttgatctgcatggagatctggagattgattcattttcaaaaagcttggacggcttatcgcaaaaatatgacattttccgcacgaatttttacagaggctggaaagatcagccgctccaaatcatattcaaaacgaaaaaaatcggttttcaattcaatgacttacgagagatgaaggaatcacaaaaagaagcgatgattcaggaatatgccagagaagataagatgcgggggttcgacttagaaaaaggcgcgttaatgcggttattcatccttcgtacggatgaaaagacataccgttttatctggagtttccaccatattttgatggacggctggtgcctgccgctgattacaaaagaaatattcgagaattactttgccttgcttcagcaaaagcagcctgaacaatcatcaattactccgtacagtcaatatattgaatggctcggccggcaagatgcgaaagaggccgcggcttattgggatcagtacttggagggatatgaggagcaaaccggccttcctaaggatcaccatgcagcggaagacggacgatacgttcctgaaaaagtgacgtgtgacataagctccgatctcacttcgaaaatgaagcggacggcaggcaagcatcatgtcacgctgaacacgctgctgcagacggcatgggcggttttgctgcagaaatataaccgtagccgggacgttgtgtttggaagtgttgtatccggaagacctgctggaattccaaacgtggaaaccatgatcggcttattcattaacaccattcccgtccggttccgatgtgaagccgggacaacgtttgctgagcttatgaaagaggcgcaggaaagggctgtagcgtctcaacaatttgagacacacccgctgtacgatattcaagcgcgtacaacgcaaaagcaagatttaattacacatttaatgatattcgaaaattatccggttgatcagtatatggaaagtataggcagccagaacgaaacatccatcaaaatttccaacgtacaaatggaagaacagaccaactacgattttaatttgaccgttataccgggcgacgagatgaacatctcttttgaatacaatgcaaatgtgtatgatcaggcaagcatagagcgtgttcgggaacatttcatgcaaatcctgcatcaagtcgtgacagatgcggatatccgggtggatcaagcggaattgttaacggaaggcgaaagaagaacccttctgcagacgctgaacgacacggccgcgccgttcccgcagacgccggttcatcaactatttgaagagcaatcgcagcgtacgcccgatcaagcagccgtcattgataaggacaggcagctcacgtacggagagctcaataagcgggccaaccgactggcgcgaacgttaagagcgaaaggagtgcagacggatcagcctgtagccatcatcacaagaaacagcatcgaatcggtggtcggaatccttgccgttttaaaatcaggcggagcctatgtccctatagatccggaatatccgcaagaccgcatccggtatatgctggatgactcccaagccggaatcgttttaatgcagcgggatgtcaggaaacagcttgcctatgaaggcgccacggttttacttgatgatgaaagttcttatcaccaagatgactctgaccttgctccgataaatgatgtgagccatttggcatatgtcatttatacgtcaggttccacaggccggccaaaaggcgtactaatcgagcacggaggcttgaccaattatatttggtgggcgaaagaggtttatgtaaaaggcgagaaagccaacttcccattgtattcgtccatttcttttgatctgacggtgacttctattttcacgccgcttgtcacaggcaatgcaatcatcgtctatgacggagaggataaaacagctctgcttgaatcgattgtgcgggacccgagggtggatatcattaaattgaccccggcccatttgcaggttttgaaagaaatgaacattgccgatcaaacggctgtcagaagaatgattgtgggcggggaaaacttaagcacccggttagcccgcagcattcatgaacagttcgaaggccggattgaaatatgcaatgagtacggaccgacggaaaccgttgtcggctgcatgatttaccgttacgatgccgcaaaggacagacgggaatcggtaccgatcggaaccgctgcggcaaacacgagcatttacgttcttgatgagaatatgaaacccgcaccgatcggagtgccgggagagatctatatcagcggcgccggtgtggctagaggatatttaaaccgtcccgaattaacagcagagaaatttgtcgttgacccgtttgaacccggagcgaagatgtataagaccggagatttggcgaagtggctggcggacggaaacattgaatatgcgggcagaatagatgaacaagtgaaaatcagaggctatcgtatcgaattaggcgagatcgaggcggcactgcttcaagaagaagcgatcaaggaagctgtcgttacagccagagaggacgtccacgggtttaaacaattgtgtgcatattacgtgagcggcgggcaaacaacggcagcccggctccggaaacaattgtctcaaacccttgcaagttatatggttccggcttattttatcgagcttgatgaaatgcctttaacttctaacggaaaaataaacagaaaagggctgccggctccggatttcgaactgcaggacagagcagagtataaagctccccgaacaaaagctgaagaaatattagtttctgcctgggaatcggtattaggcgctgaaaacgtcagtattcttgataatttctttgaccttggcggagattccattaaatccattcaagtatcctccagattaaatcagcaaggatacaaaatggaaatcaaggacttgtttcaatatgcaacaattgctgaattgagtccgcatatcaagcagaatctgcgtatagccgatcaagatgaggtcaaaggaaaagtcagcctgactcctattcagcattggtttttcgaacaaacaacaacagatcagcattattataatcaagccgtcatgctgcatgcgccggaaggttttcaggaaacgcagcttcgtcaaaccctgcaaaagcttgctgaacatcacgatgcgctccgcatgacgttccggactacggaaaatggctgcgaggcgcagaatgaagaaatcgcccaaagcggactgtaccgcttagaagtcctgaatctgaaagaagattccgatccgggacggacaattgaagccaaggctgatgagatacaaagcagtatgcgtttaagtgatgggccgttaatgaaagccgtgttgtttcaatgcgcaaatggagatcatctgctcattgccatccatcatttgattatagacgggatttcatggcgcatcttactggaagatatcgttagcggctacaagcaagccgagaacgggcgagtgattcaattgccgcaaaaaacagactctttccaattatgggctaagagactttcagaatacgcgcaaagtgaaaccataaaacaagaacaggaatattggacaaagatcgaacaaaccgatgtcaaaccgctgcctaaagattttcatgaaacccatacaactgcaaaagacagtgaaacagcaactgtggaatggacgaaagaggaaacggatctgctattaaaacaagcgaatcgcgcttataacacggaaataaacgatttgcttttaacttctctgggtctttccatatcgcattggtcaggactggaacaaattccgattcatttagagggacacggcagagaacagattatacaagatatagatatctcccgcacggtcgggtggtttacaagtctgtatccggttgtgctgcacgcgcagccgggcaaagaaatctctgattatatcaagacgaccaaagaaggattgcgccaaattccgcataaagggatcggatatggaatagcaaggtacttaagcggcggaatgccatcgaaactcaatcctgagatcagctttaactacctgggacagtttgaccaagatttacagcagcatggggttcaattatcttcttattcttgcggttcagactcaagcgaaaatcaagaaagaccgtatgtattgaatataaacggaatgatcaccgagggccggctgaggcttacgatcagctacagcagcaaacagtacgcaaaagaaacgatcatgcggttatcggaaacgattcaaagccgcctgcggtccatcattacgcattgcgttcataaagaacaatcggaactgacgccaagcgatattttgttaaagggcatgtccattgatgaattggatcagctcctcattcaactgccgcatgcaggtgaggttgaaaacgtgtatccgctcactccgatgcagaaaggaatgctcttccacagcctgctggacgaggcctcaagttcttattttgaacaagcatcgttcgatttgcagggagagttaaagattgattggtttaaagcaagccttgaacgattatttgaaacatacgccgtgctcagaacccgtttttacagcggctggaacgatactcctttacaaattgtctataaaacgcaaacaccgcaaattcattttacagatttgcgtgacatagaggagcacctgcgagaggatgcaatcgcagcctatcaaagagaagacaaggcaaaaggatttgacttggctcgggatccgttgatgcgcattgcgattttccgtatggaagaccgcaaatatcatttgatttggagcttccatcatattgtgatggatggctggtgcctgtctcttatcacgaaggaagtgtttgatcattatagcgccttacaggaaggcagggaaccagaaccgccatcggcagctccttacagcgactatatcgagtggcttggccgccaagatcagggagcggcaaagcggtactggagcaggtatcttgaaggatataaaggtgaaaccacgcttcttcataaaatagcgcagcatgaacaaaaagaatacgcctatgccaatgtgatctgccgatttgatcacgaacagacaaaacaattacagcagatcgcaaatcagcatcaggttacattaaatacgttgatccaaacgttatggggaattttattacagaaatacagcgggtccgcagatgttgtcttcggcagtgtcgtgtcgggaaggccggcggaaattcctgatgtggaacagatgatcggcctgttcatcaataccattccggttcgcatccgctgcgaggaggacagcacttttgctgatacgatgcaaatggttcaacaaaacgcgctggcttcccaatcgtacgatacctatcctttatacgaaattcaggcccaaacggaacaaaagcagaacctgattgaccatatcatgatttttgaaaactatccgatcgggcagcaggtcgaagagacgggacatcatggtacggagctgaacattacgaattttcatatgcaggaacactcccactatgatttgaatgtggttgttattcctggcgaacagctggccgttcatttcggttttaatgaaaatgaatatgaaaaatcagaagcggaacggctctgcggacattttgaacagctcatgcagcaagtattacagcagccgtctgtcaaaatagaagaattggagcttctctctcaacaagaaaaagaacatctgctcagccgctttcagtctaatgacatgcaatacccgcgtgaaaaaacgattcatgagttgttcgaggaacaggcgcaacgtactccggacaatacagcggttgtattcgaggataaacaactcacctacggagaactgaatcggcgtgccaatcagcttgcgcgaaccttgcaggcaaaaggtgtgcggaacgatcagcttgtcggtattatgactgaacgctcgcttgagatgattgtaggcatcttgggagttttaaaagcgggcggcgcatatttgccgatagatcctgattctccgtctgaacgcatccgttatattttgagtgattcaagtctcagcgtattgctttaccgcgggaagctgcaggatgacatcggcttctcaggaacatgtatcgaactcatggaggaacatttctatcacgaaaaagacagcagtcttgcactctcttatcagtccagtcaactggcctatgccatttatacttccggtacgacaggcaagcctaaaggcacgttaattgaacatcgccaggtcattcacctgattgaaggacttcgacgccaaatttactctgcctatgaggcggagctgaatgtagccatgctcgctccatattatttcgatgcttctgttcagcaaatgtatgcttccttgctgtcaggacataccttgtttattgttccgaaagagattgtgtcagacggtgctgccttatgccgttactaccggcagcattcgattgacatcaccgacggaacacctgcccacttaaagcttttgatagctgcgggtgatttgcagggagtcacgcttcggcatcttttaatcggaggagaggctctttccaaaacgacggtaaataagctcatgcaattattcggcgatcatggcgctgcgcctgggattaccaatgtatatgggcctacggagacttgcgtagacgcgtctctgttcaacattgaatgttcttccgatgcgtgggcacgcagccaaaactatgtccctataggcaagccgttaggcagaaaccgcatgtacattcttgattcaaaaaaacggctgcagccggcgggcgtccaaggcgagctgtatattgcaggggacggtgtcgggcggggttacttgaacctgccggaactgacggacgaaaaatttgttgccgatcagtttgtaccggaggaccgaatgtacagaaccggtgatctggcctgccttctgccggatggaaatattgaatatatcggccggattgatcatcaggtgaaaattcaaggttttcggattgaactcggtgaaatcgaatcggtgatgctgaacgttcctgatattcaagaagccgccgcagctgcccttaaagatgcagatgatgaatattacttgtgcggatactttgctgcggataagacaatacagatcagtgaacttcgcgaaagaatggcccggcatttaccgggatatatgatcccggctcattttgttcagctggataagatgccgctgactccaaacgggaagttgaatcgccagttattgccggctccggtcaaaaagcgtgacagcggcatagagtacgtcccgccgcaaacttcggcagaaatccagctgacagcaatttgggaggatgtcctcggattagagcaggtggggatcagagatcacttttttgagatcggcggacactccctgcgggcaacggcgctgattgcaaaaatacaaaagcaattgcatgtccaaattcctttgcgggacgtcttccgtttcccaaccattgaacagctcgcacagacgatcacgaagacggagctgaccggatatgctgcgattcctgcaattgaaaaaagaccttattatccggtatcctcagcacaaaaacggttgtacatcctgaatcacttggaaggcggagaactcagttacaacatgctgggactgatggctgtcgaaggcaagcttgaccgtgacaaactgcagcaagccttccgcacgctgattttgcgccatgaatctttgcgcaccggttttaaaatggctgacggagaacccgttcagtatgtcttggatcatgcagcgtttgaaacagagtggtaccaaggggaagaagatggtgctcacctttatatccgccaatttattcgtccttttcacctggatgagccgccgctgcttcgcgtggggctgattgaacttcaacctgaccgcggaattctgatgtttgatatgcaccacattatttctgacggaacgtccatgagcgtattgatcaaagaatttatccgcatttatgaaggagagacattaccgcccctgcgcatccagtacaaggactacgcggtatggcagaccggcgaagcgagattacaacagattcaaaaacaagaagcctattggttagagctgtacagcggcgacgttcctgtccttcatctgccgaccgattatatccggccgtcggcacgggattttgcgggagccacaatgcagtttacgcttgataagcaaaaaagcgatgggttaaagcagctggcatcccaaactgaatcgactttatatatggtgctccttgcgtcttatacattattgctttcaaaatacagcggccaggaagacattattgtcggcagtcctatagcgggaagaccgcacgccgatttggaaccgattatcggaatgtttgtcaatacattggccatgagaaattaccctgaaaaagggaagacgttctctcagtatctgtccgaggtgaaggagaatgcattaaaagcttatgaacatcaagattatccgttcgaagcgctgatcgatcaactgaatatcgccagagacttgagccgtaatccgttgtttgacaccatgtttgtgcttcaaaacacggagcaggaacaattagagataagtgacgtcactttcaaaccatatccaaacggacatacgatggcgaaatttgatctaactttaactgccgtggaagaagaggcgggtattcagttcacgatggaatacttgacggccctgtttaaaccggaaacgatcgaacgtatgatggggcattttgtgaagctgattgattcgattattaaacagcctgatgccgagctggctcgtctgaatataatgacccaggaagaggaaagagacattcatcagctctttaacgatactgcagcagaaacacgtattccgactacggttcatcagctttttgagcagcaggctgtgcttaatccggaccatgaagccatcatgtttggaaatcagacgctgacttatcgtcagctgaatgagcgttctaatcagctggcgcgcgtccttcaagataaaggtgttggcactgatcaggtggttgccgttctcacggatcgctcagcaaatatgatcatcggcattttagccatattaaaggccggcgcagcatttctccctatcgatccggagcttcccgaaaaacggcgggcttttatgctgaaagacagcggtgccgacgtgcttttgacttgtgcaggtcccgctattccgccgctctttgaaggagaagtgcttctgcttgatgatccgatgatatatcaaggcagagcagacaatcttaatctttcctgctcggaaaatgatttaatgtatgttatttacacgtcaggcacaacggggcagccgaaaggcgttcagctggagcacaagaccatgacgaatctgctcgcttatgagcaggatcatacgcagctgcagtttgacagagtgctgcaatttgccgcaatgagctttgatgtctgctatcaagaaatgttctccgcgctttcaagcggaggaacactctttatcatcggcaatgaggcaaaacgtgacatacgtcagctcaatgattttgtcagaacgcacgggatacaaacagcatttcttccgacagcgttccttaagcttcttgcctcggagaaacactatttcgaaccatttgccgagtgcgtagatcacatcatcgctgcgggggaacagctcatcgtaacaagtatgctgcgtgacatgctggcgcgccagcaagtcacattgcataatcattacggtccgtcggagacgcatgtcgtgaccatgtataccgttgatccgaatacagatcaggagcttcagccgatcggcaaaccgatttcaaatacggagatgttcattttgaatgaagccggaacgcttcagcctgtcggagtcgtcggtgaactttgtatttcaggagtgagcctggccagaggctatcataacagggagtctttgacgctcgaaacttttgttccgcacccatatgactcgaatcagcggatgtataaaacaggcgatctggcccgttaccttcctgacggaaacattgaatatgcgggaaggagggaccatcaggtcaaaatccgcggttaccgggttgaactcggtgaggtggaggccgctcttctcaagcacgtacaggaagcagttgtcctagcaaaagaaaataccgatggccaaagtgatttatatgcctattttacagcggagcaatcactctcgatcagtcagctgaaagaaaaacttgctggtcaaataccgggatacatgatcccttcatacttcatccagctggagaaactgccgctaaccggcaatggaaaagtaaatcgaagagcattaccgatgcctgaagctggtttgcaaacgggaaccgactacgttgctccgcggacgaatatggaagagcagctgatatgcatctggcaagacgttttaaaggtaaaagaaataggtgtaaaagataactttttcgatttgggcggccactcgttgcgggggatgacgctcatcgccaaaattcataagcaattcagcaaaaacatttcattaagagaagtctttcaatgtccgacagttgaggaaatggcaaaggtaattgcaggagctgaaaccaacgggccggattacattccgaaagccaaagcaaaagatgtctatcctgtatcttccgtgcagaagatggtttacctgtcaacacaaatagaaggcggagaacttagctacaatatgccgggaatccttacattagaaggaaaactcgacatgaatcgcctgcaaaccgctttccaaaaactgatccagcgtcatgaatcgctgcgtaccggttttgaaatggtccgcggagaaccggtgcaggtgatcaaaccgcaagtggagttttcgatggaaagatacaaggcaacagctgacgaggttgaggaatgtttccgcaccttcgtgcggccgttcgatctcagccaggctccattacttagggccggactcatcgagttagaacaagacctgaatatttttatgtttgacatgcaccacatcatcacggacggcgcctccatgaatatttttgtcgaagaactgattcaaatgtatgacgaaaaagagttagctccgctccgtattcagtacaaagactttacggaatggaaacatcaaaaagagcaaagagaacgaatcaagaagcaggaagagtattggcttggtgtatttcatgaagagctcccgtcattcgagcttccgaaagattttgcgagaccgccggttagaagctttgatgggaaaaggcacaattttacgctcgataagactgtcacccaagggataaagcagctggaagaattgactggaacgaccgcttacatgattttgttctcggcctattccatactgctggcaaaatacagcggtcaggatgatatcgtcgtcggcacccctattgcggggagaccgcatgcggatttggaacccattatcggaatgtttgtcaatacattagccatccgcaccgctccgatggcagaaaggacatttttggattatataacggaaacgaaagaaaccatgctgaaggcttttgaacatcaagagtatccttttgaagaattagttgaaaaactgggtgtgaaacgggacttaagccgcaatccattgtttgatacgatgtttgtcctgcaaaataccgaacaaacggatattgaagtggactctctcgcagtcagaccttatgaacaaacggagacggcagccaagtttgatttacagctgaacttcttaatagatcaagatgagattcagggcagttttgattactgtacaaaactatttaaaaagaaaaccattgctgtattggacaaggattacgtcatgatcctttcggcgattatgagaaacccatccattcctttaaaagacattcaattaagcgaaaaagtaaacaaaagtaaacatctcgcaagcacaatcaaattggatttctaatcacaggggcagcggctgtcccggcatgaatgccgcggctgccgccagccgcctgaaaacaggaatgaaaccaactggagggatatgaatgtcagaattcaaacaacaggagttgttctggggccgaatgtttcacacggaagaccgtcccagtgcattcccttcgtttcaagtgtccgactcaacagtaaagcgtgatataacaagcggatctgactgtattcacagttcattgagtgcggatgtatcacagcgcatcctgacgatgacgaaccaaacgccaatggccgtctatctggttctcctgatcggaattgaatcccttttatacaaatacacgggggaagagggcgtgattacaggggttccaacctttgaagacgaaactgatgaagatcttcgttcagaccagctcatgttaatcaaacagcatatcaattccggcagtacgtttaaatcaattttccatgaattgaaacatacgctggacgaagcgatcttatatcaggacgttccctttgataaaatggccggacagctgaggctgaactacaatgcaaatcatttgccgatcatccatacagtcgtttcactagagcaaattcattctgatggtttcatagaaacggctgctgcagatgctttatttcagtttgctatgggtgaagacttgattgacctaaagttatgttttaatgaacaagtctatgaccgtcagtatatgatgcaggtgctcggacatttaaaccggatattttctgtcatattatttcagcctgacctccccctcggccaagtgaatattttgccagaatcggagacacatacacttctcgttgacaatcaaactgcgaaaactgaatatccgcgggataagacggtttatcagttattcgaagaacagatgaaacgaacaccggatcaagcagccgttatttgcggagaaaagcaattcacatatcgccagctcaatgaacgtgccaatcaattagcccgaacgttaaggaaaaagggggtaaagacggaccggctcactgcgattatttgcgaacatgagatcgaattggtcgtgggaatactggccgttttaaaagcgggaggggcctatgtgccaattgatccggattacccgaagcatcgcatacagtatatagtagaagactcccaagctgatatcatcctgacgcagagccatcttcaaaaacagttggaacttgcgggcacaatggttttcctcgatcaagaaaactcttaccacgaagacggctctgacctggaaccgatcagcagtacgaaggatttggcttatgtcatttatacgtcaggctccacaggcaagcctaaaggagtggcaattgagcaccagggcttaaccaattatatttggtgggcccgccgggtctatgtcaaaggggaaaaaaccaactttcccctatattcgtccatcgcttttgatctgacgataacgtctgttttcactccgcttgttacaggaaattccattattgtctacggaggagaaaacagtgctgccttgcttgattgcattattcaggattcaaggacggatattatcaagctgaccccggcgcacctgcagttattgaaagagatgaatatccctgctgagtgcaccattcggaaattcattgtcggcggtgacaatttaagcacgcggctcgcccgaagcatcagcgggaaattcggcggaaaaatcaaaatttttaacgaatacgggcctacagagacagtcgtcggctgtatgatttattcctttgatccgcaaaacgacagacgggaatcagtgccgatcggaaccgccgcagacaacatgaacattttcgtgctggataagagcatgaagccggtgccggccggcgtcccgggagaaatctatatcagcggggacggcatcgccagaggatacttgaacagagcggaattaacagcggaaagatttttgcagcacccctttgtgccagaggtgaaaatgtaccggacgggagatttagcaaggcgactcccggacggaaatatcgaatatttaggccggatcgaccaccaggtgaaaatccgcggttaccgcattgaaatcggggaagtcgaatccgcatttttccaaataccgccgattcaagaagctctcgttatggcacaagaaaccaacggggaaacatccttgtgcgcctattataccgcacagcattctttaaccgcaggcgaaattcaggagcacctgtcccggcagcttccgtcctatatgatccctgcttattttgtacagctggaagcgatgccgcttacttccaacggaaaaatagatcgccaggcgctgcctgctccaacgggaaatctcactggcaatccctatacagctccgcggacagaattggaaaagatactggccagggtgtgggaatcggtattaggcgcagaacaggtcggaatcgatgatcatttctttgagctgggaggagattcgattaagtcgattcaggtgacctcaagcttatatcaagccgggtataagcttgacatcaaacacttgttcaaacacccgacgatctccgggcttgctccttttattgagcccgttacccgaatcgcagaacaaggggaaatcaaaggccgtaccttattgacgccgattcagcattggtttttcgcccggcaataccctgatccgcaccattataatcaatctgtcacgctttattttaaagaggggttggacgaatcgaagcttcagaaagtcatgaagaagatggccgagcatcacgatgctttgcgcatggtctatgttcaaggagatcatgaatacgaagccagaacccgcgggatcagtgaaggagaattattcagcctcgacgtgttctctttactcgaagaaaacaacccagccgaaacgattgaaacgatagccaatgacattcagcaatccatccatctagccgatggtccgctcatgagactgggattgtttcaatgtcaagatggcgatcatttgctgattgcgattcatcatctggttgtagatggcgtatcgtggaggattttacttgaggatataatgtcagcttatgagcagctccaaaacggagaagcgatcacgctccctaagaagacggattcctatctgttatgggctgaacgattgaaacgttatgcagaaagtccggaatttgaagcggaaaatcaatattggcttgagcagaaacatatctcgcaacacaaattgccaaaggacaatgagcaggagaccggtctggccgaagaccgggaaacgatcatcgtccaatggacagaggaagaaaccgagcgtttattaaaaaaatcgaaccgggcctatacgactgacattaatgatttattgctgaccggactcggaatggctgttcatcgctggacggagcatgaagaaattcatgttcatctggaaggacacggcagggaatctatttttcaagacgttgatatttcacgtacggtgggctggttcacaacccaatacccggtttctcttcaaatccaggcggaccgggacatctcccagcggattaggacggtgaaagaacagctgcgtcagattccccaaaaaggaataggatatggactgatgaaatatttgtccgatcacccgaaggcatcagaatggaccggacatccggaaatcagcttcaattacctaggacaatttgatcaagatttcgaaaatggaggaatcgaggtatctccttactccggagggaaaattgcaagtgacagacatcccattgcctatacgcttgacattaacggcatgatctcagacggccggctgtcattggccatcagttacagcggtaaacaatatcgaagagaaacaatggaaacatgcgcagctctcttaaagaacagcctaaaagaagtcatcgaacattgcgcagctcaagaagacattcacctgacgccaagcgatatctcgctgaaggacataacaatcgaggaattagatcaatttgttcagcaaacacagcatatcggcgacattgaaaatatatatcctttaactcccatgcagaaaggtatgctgttccatagtttaatcgattcggcttccagagcttactttgaacaagccgcttttgatctcaaaggcgacttggatatcgaggcatttacaatgagtttgtcgcagctggcggaaagacatgagattctccggactcatttttatacggaatggaaagatcagcctttgcagatcgtattccgaaaaaaaccgatcgaaataactgttgaagatattcgaagcatgaagaataaacaacgaaacgagttcattgccggctttgtacaaaaagataaggcaagaggattcgaccttacccaagatgcgttaatgcgcgtatcaatccttcgtacagaggatgaccaagtccggttgatatggagcttccatcatattttaatggatggctggtgtctgcctcttattacgaatgaagtatttgaaacctattatgcgattcttgatagaagaaaagcggagcgggaagccgtcactccgtacagccgatatatcgaatggctggaaaaccaggatcataagcacgcttcagcctattggcagaaatatttggatggttatgaaggacaaaccgctttgctgaaaaaaaccgattcaaaccaaggcaaaggatatcaaaaacaaaggcttgcaagccggctcggaaaacagctgtcagaagaaatcagacagactgcaagcaagcatcacgtcaccgtgaatacattcattcaaagtgcgtggggactattgctgcaaagatacaacaacagtcaggatgtcgttttcgggtcggttgtatccggccgcccggcagaaattccgggtattgaatccatggtcggtttatttatcaacaccattcccgtacgtattaccgctcagcctgaaatgactgtggaacaagtgttgaaaatgagccaggagcaggcattggcttctcaggcgtatgatacatttccgttgtatgaaattcaggctcaaaccgaacaaaagcagcagctgatcagtcatatcatggtatttgaaaattatccggtcgagaaacaaatggagcatatgaaaccgaatcgtgacgcgctggacattatcaatttccatatggaagagcatacccattatgatttcaatttcattgtcatgcccgcgggagaaatcgacattcattttgtatacaatagcaacgtctatgatcatgcaagtgtcaagcggatggaagagcattttatacaaatcattaagcagatggtgaacagtcaggcgattcgcgtccaagacttggatatacttacgggggatgaacgttcgctccttatagaggcatttaatgatacggaagcagattatccaaaggaaaagacgcttcataaattgcttgaggaacaagcacagcgtacgcctgatcaaacggctgtcgtatacggggaaagccagctgacataccaggaactgaatgaaagagccaatcaacttgcccggacattgcaatcagaaggcgtgcagccggatcagccggtcgggattatggccgaacgttccttggaaatgatcgtaggactcttcggaatcttaaaagccggcggcgcgtatgtgccaatcgatccgagctatccggaagaacggattcactatatattggaggattcggatacgaagctgttgttagtacagagtcacttgaggaaaagcgtgccttttacgggaaaagtgcttgacctggaagatccgcgattctcttgggaagatggttcaaacttgaaacagacggccggaccgaatcacttagcttatgttatctatacttcgggatcaacaggccgaccgaaaggggttatggtggaacaccgatccgtaatcaaccgtctcgtttggatgcaggaacattacccgctggataagcaggatgtcattctgcaaaaaaccccaatcacctttgatgtatcggtgtgggagttgttctggtggtcgatgactggttctaaagcggtattgcttccaaacggaggggaaaagaaccctgacgtcatcttagatacgattgcgcagaaaaatgtcaccgttatgcattttgtgcctgcgatgctgcatgcttttcttgagtccatggagcagaaatccgacgaggaattaaagagaaagctggcatcattaaaatatgtatttgcaagcggcgaggctttgacgcctgcgcacgttgccgggtttcatcgcttgatcacaccggcgggtgaggctcaaatcatcaatttatacgggccgaccgaagcgacgatcgatgtatcgtattttgaatgcgaagcgggagaaacgcttaactcagttccgataggtaaaccgatttccaacattcaattgtatatcgtacacccccaatcggaatattttcaaccgctcggtgtggcaggagagctgtgtatcgccggagacgggctcgcacggggctatttgaaccgcccggagctgacggctgagaagtttgcggctcacccatttgaagcagggaagcggatgtaccggacaggcgacttggcaagatggctgcccgatggtaatatcgagtatttgggacgaatcgatcatcaagtgaaaatccgaggctaccggatagaactcggcgagatcgaagcatctttattacaactcgatgcagtcaaagaagcggtcgttatcgcgattgaagaagagggctcaaagcagctgtgcgcctacttgtcaggtgacgggtcagtaaatacggcgcagctgaagcgtcatttactgaacaaactgcccgcttatatgataccggcttactttgtccaaatggagaagatgccgataaccgcaaatggaaaaatcgatcgaaaagctttgccgactcctgagggaaataggcttaccggaaccgaatacgaagcgcccggaacgttaattgaaaagcagctggccgagatttggaagaacattttagctctcagcgacccgggaattaaagataacttctttgatgttggcggccattcgctcaaagtattgcaagttattcatcaaatcaacgaccgtatgggaatcaaaatgcattatcaagccgtatacgattttcctaccatcgaaacaatggcacgcgccattcaagcggcagttttcgagtccaagacggataacgtattcgtcaagatgaatcagaacggttcaatccctgtgttctgtttcccgcctttaatcggatacgggctggtctataatgaaatggcgaaaagacttgacggccgctgcaccgtctatgccgctgatttcctagaagagccgtcttacgagcaagagatcgttgaccggtatgcagaaagcatgataggcattcaggaacaagggccctttgttttacttggttactcctcggggtcgaatttggcttttgaggttgccaaagccttggagaagcgcggacgcatcgtatcggacattatgatgcttgattctaaaagagccgtttcggtgaattatttttcggaagaggaaaccgaagagatcattcatcggaatctggatatcattccggattattatagagaattattaaccattccttccattaaggataaaatcagaagctatctcacatatcacaataaactgatcaattccggcgcggtgaacgccaacattcatcattttctatgcggcgagttgaccgatagaggatggaagcaatcaaccgcccagcattaccttgagtacaaattaaaaggagaccatgtgacgatctttgaccctcacaatattgaagaaaatacggatacaattcgatctattatcaaaaggattgaagaacggcatcatcacggacttgttcttgaagaacaactgtcaatgggatcgtttgcgggagacgcaaagtttgacaaaatgtaaatgatcaagtgtaaaacgccgctggcctggcactcagcggcgtttttattaaaaaggcgagagtcatactcctgtgttcgcaaggcttactccagagccgttctccatgaccagttgtcatcaaatggtaaaaaaatcatcatacattttaaggaaaaaggaggatgtcaagttattagaaaaaagtgtagcgtatgtttataggtactagctctattattgagtcgcttaactgcggagtctgctttttactgccggtactgcaatttgttctcaaatggtaaaagttccctaaatttaaagaaaaaggaggagcgttaagttatgtataaaaaatgttgggtatgcctatgggtccttgctttattattgagttgcttcactgggaagtctgcgtatgctgccagcactccaattgcaaaacatgttgggaattcaaatccgcttatagaccatcatttgggagcagatccgtttgcgctgacctataacggaagagtctacatctatatgtcaagcgatgactatgaatataatagcgacggaacgattaaggataattcatttgccaatttgaataaaatatccgtcatatcttcagcggatatggtgaactggacagatcacggagcgattcccgcagcgggtgccaatggggcgaatggcggccgggggattgccaaatgggcaggagcatcatgggccccgtcagccgcggtgaaaaagatcaatggtaaggataaatttttcctttatttcgcaaacggcggcggaggtatcggggttctcaccgcagacagcccgaccggcccatggacagatccgatcggaaaaccgcttgtaacgccaaatacgccaggaatgtccggtgttgtatggctttttgatcctgcagtattcgtagatgatgacggtaccggttacctatatgccggcggaggcgttccgggcggttcaaatccatcgcaggggcaatgggccaatcctaaaacagcaagagtcatgaaattaggtcctgatatgaccagtgttgctggaagtgcatcgaccattgatgcgccttttatgtttgaagactcagggatgcataagtataacggaaaatattactattcctattgtatcaatttcgggggcgcgcaccccgccgataaacctccaggtgagatcggctatatgaccagctcaagtcccatgggtttcttttcgtatagagggcactttctgaaaaatccgggagcatttttcggaggcggcgggaacaatcaccatgctgttttcaattttaaaaacgagtggtatgtggtgtatcatactcaaactgtcagctccgctctttacggagccggcaaaggataccgttctccccatattaataagcttgtgcataatccagatggctccctgcaagaggtagcggcaaattttgcaggtgtcaaacagctatccaacttgaatccatataaccgggtagaagcggaaacgtttgcctggaacggacggattttgacagaggcatcctcagcgcccggcgggccggtcaataatcaacatgtcacaaacattcataacggagactggattgctgttggaaatgcagacttcggctcaggcggcgccaggacgtttaaagcaaatgtagcgtccgctcttggcgggaaaatagaagtgcggctagacagtgcaaacggtaagcttgtcggaaccttgaatgtcccttccacaggcggaacgcaatcctggagagaaatagaaactgcgataagcggcgcaacaggtgttcacaacgtattctttgtatttacgggaactgatacaggaaacttgtttaacgttgattactggcagtttacacaaagataagcaaagatacgttttctaagtccataaaagacatatgaaagagaggaaaaaatgatgtcgagcgtaaaaaaatcaatttgtgtattattggtatgtttcacaatgatgtccgtcatgctcttaggaccgggagttactgaagtttcagcagcaagtgatgcaacagttaatatatctgcagatagacaagtgattcgcggttttggaggaatgaaccacccggcttggattggagacttgactgcagcccaacgggagaccgcttttggcaatggacagaatcagttaggtttttcggtcttaagaattcatgtagatgaaaatagaaacaattggtacaaggaagtggagactgcaaagagtgcgatcaaacatggagcaatcgtctttgcttccccttggaatccgccaaacgatatggttgagactttcaatcataatggtgacacatcagctaagcggctgagatacgataagtacgccgcatacgcgcagcatcttaacgatttcgttaatttcatgaagagtaatggtgtgaatctgtatgcgatttctatgcaaaacgagcctgattacgctcacgaatggacatggtggacgccccaagaaatcctgcgtttcatgagagagaatgccggttccattaatgcccgcgtgattgcgccggaatcatttcaatacctgaaaaatatatcggaccccattttgaacgatccgcaggcgcttaggaatatggatatcctcggaacccacctgtacggcactcaggtcagtcagtttccttatcctcttttcaaacaaaaaggaggagggaaagagctatggatgacggaggtatactatccgaatagtgacaacaattcagcggatcgctggcctgaggctttaggtgtttcagagcatattcaccattcaatggtagagggagattttcaagcttatgtgtggtggtacatccgcagatcatacggccctatgaaagaagatggaatgatcagcaaacgcggatacaatatggctcatttctcaaaatttgtgcgccctggctatgtaaggattgatgcaacgaaaaatcctgaaccgaatgtttacgtgtcagcctataaaggagacaataaagtcgtgattgttgccattaataaaaataacacaggagtcaaccaaaactttgtgttgcagaatggaactgcttcgcaagtatccagatggaccacgagcagcagcagcaatcttcaacctggaacggatctcaaagtaacagacaatcatttttgggcccatcttccggctcaaagcgtgacaacatttgttgtaaagcgttaaaggcatcagcatcgcaataagccaattttcttacttgaaaaagaaaattggcttattttctgtgggatagaagtgttgatttttttaacgatgcacagacattgggtataataatgacaatgacttcaaggagtgatcaatatatgtcacggcttcacagcaaagtattaatcatagacgacgaaaaagaaattttggaactgatcaaaaccgtattaataagagaaggcattgatcgcgtgatcaccgcttcgactgcccgtgacggattggctcaatttcatcaagaaaatcccgatcttgtgatattggatatcatgctgccagacggtgaaggctatgatatctgcaagcaaataagagacatttcacacgttccgattatctttttgtctgcaaagggggaggaaacggataaaattgtaggacttgccatcggcggggacgactacattacaaaacccttcagccctaaggaagttgcatatcgggtcaaagcgcagctgagacgggtctcttacttacagccttctcaaaccggaaccgtgataaaaaaagggccatttgaattaaaccaacaacaagccgagctcaccaaaaatggagcggctattgagttaacacctaaagaacttatgcttatgacctattttctgcagcatcccaatcgggtgatcagtaaagaaacactctatcaagctgtatggggagaagatttcttcggttctgacaacacggtgatggttcatatacgcaggctccgtgagaaaatagaaaacatcccatcaaaaccagactttctcgtcactgtgaaagggttaggctacaaatttgctgtaaaggatgcgtaaggatgaattggcgattaacaggcaggtatatggtctctgtcattatcgtgaccatcattacagtcttcattaatttatttatttttatgtttttgctcgttttccaggcgaacagccaacatgacgaagaaagcacaccggaaactttcacaagatcattccgacaatatgtcacgttatcgaacaatggtatcacagtaaacaaagagggccaaaaagctttaaaagagcagaatgcatggattcaaatattagatgaaaacggacaggatgtttatcatgatagagaacctaaaggactgaaggaaaaatatacgcctattgaaattgtaaatttacataaatataaggatgaacgattattatcaaccatttacgccggcggaaaaaaagtaaacggcaaggagtacagttactttatagggtttaaaaatccctctctcggaaaatatgtcctctcatatgataccaaggaatttgtgacgaagttcaatgcagggaccatcatattattatcaatagatgcattgatcgcgttactcattggctatctattcagccggcagctcacaaaaccgctcggccgtgtcattcaaggaatccagcggttagctaatggagattatacgatcaaaataaaatccaaaggcatttataaagatgtcttctataatgtcaatcatttatcggaacaactatcttcaagcaaaaaagaaaaagataaattagagcaaatgcgtgaagagtggatcagtcatatttctcatgacattaaaacaccattagcatctattcaaggctatgcagaaatcatccaagatccaaattaccatctcacagtcgaacagatcagagagtacgcccagatcattgagagtaaatccctctatatgaaagatgtgatggaagatttaaatttaacgacaaggctgaaaaacaacgatgtgatgttacatacagaacgggtaaaccttgtatcgctgctgcgggaaacgttaattgatatgttaaacgattctagatatgcggataagtccattgaacttcaaacgaacctggaaaagctgatgctgaaccttgatgcgatattgattcggagagcggtcacgaatctcattttaaatgccctcgttcacaatgatcccgatgtgaagatcgttgtacagcttgaacaaaaagaacgaactcatgtgacaattaaggacaacggcaaagggatagaagaagaggagctggagaaagtgtttgatcgctattacaggggcacaaatacaggaacgacgcatgcaggctctggtcttggaatggccatagcaaaggatattatccaaaagcacggaggggacatcaccattcaaagcaccgcgggagaagggacaacgatagatatacaattatcataatggctatacaaaaaaggttctgtgatcaataacagaacctttttttcctattgctccgaaaacactttgattcctttgacaatgttccaaatgaaaaagtagatcgccacaaggaatgtaacagcatacgtcgcaagcaggaaaggcccggcgtgcctgatgtcattcataccaagtaaacctgaagcgatgatgccaattacaaaaatcaaataaggaatcagatgcgtccataaagattttttcgcatgatatttcacatcgtcctgacctaagaaatagacgataatcggaaacagaaatggcgcaaaaaatatactgaagtaacataatgaagacaaaattctattttctctcaaaccttttcacctctatgatttattgaagggggaattcttctggctgaatccctcactgaagtacaatcttattgtacaactccaaccttaacccgtattaatccgaaccttacatcaaccttaaattaacaaggacgggcaagggctcgtcttcttacagcaaacataagattcaatgccatattgagactcatcacattcagcgtgtctacgttggaaatacatttaatttttcgattcgattgaaaaatgacgtgtaaagtcccgattcagtccggttttctttgtactatatgtgtcaggtgtgtcttattcaatagagatagagcaaattgacaggcttttacacctcccaaaaaacaagaaattaggttgatagacaatcatgagaaagatttttacaatgagttcgagctcataagaaagagccaaaatgatgcgaaggaggaaaagatcagatatgaaacggtcaatttctatttttattacgtgtttattgattgcggtattgacaatgggcggcttgctgccttcgccggcatcagcagcagggacaaaaacgccagtagccaagaatggtcagcttagcataaaaggtacacaacttgtaaaccaagacggcaaagcggtacaactgaaagggatcagttcacatggattgcaatggtatggcgatttcgtcaataaagacagcttaaaatggctgagagacgattggggcatcaccgttttccgcgcggcaatgtatacggcagacggcggttatattgacaacccgtccgtgaaaaataaagtaaaagaagcggttgaagcggcaaaagaacttgggatatatgtcatcattgactggcatatcttaaatgacggcaacccaaaccaaaataaagagaaggcgaaagaatttttcaaggaaatgtcaagtctttacggaaacacgccaaacgtcatttatgaaattgcaaatgaaccaaacggtgacgtgaactggaagcgtgatattaaaccgtatgcggaagaagtgatttccgttatccgcaaaaatgaccccgacaatcccatcattgtcggaaccggtacatggagccaggatgtgaatgatgctgccgatgaccagctaaaagatgcaaacgtcatgtacgcgcttcatttttatgccggcacacacggccaatctttacgggataaagcaaactatgcactcagtaaaggagcgcctattttcgtgacggaatggggaacaagcgacgcgtctggaaatggcggtgtattccttgaccagtcgcgggaatggctgaattatctcgacagcaagaaaatcagctgggtgaactggaatctttctgataagcaggaatcatcctcagcgttaaagcctggagcatctaaaacaggcggctggccgctgtcagatttaactgcttcaggaaccttcgtaagagaaaacattcgcagcaacaaagattcaacgaaggacgcccctgaaacgccagcacaagataatcccacacaggaaaaaggcgtttctgtacaatacaaagcaggggatgggagtgtgaacagcaaccaaatccgcccgcagcttcacataaaaaataacgggaatacgacggttgatttaaaagatgtcactgcccgttactggtataacgcgaaaaacaaaggccaaaactttgactgtgactacgcgcagattggatgcagcaatctgacccacaagtttgtgacgctgcataaacctaagcaaggcgcagatacctatctggaactggggtttaaaaaaggaacactgtcaccgggagcaagcacagggaatattcagcttcgtcttcacaacgatgactggagcaattatgcacaaagcggcgattattcctttttccaatcaaatacgtttaaaacaacgaaaaaaatcacattatatcatcaaggaaaactgatttggggaacagaacccaattagtaagctttaggcggacatcagcaacgatgtccgcttttatcatcttaaacagcaatacatggaggtttacgtggcggatgaaactctgaaacagtatatgggcctgtacaaatgttgttagcaatctcaagaaagccaaggagtagctatgattcactgaacatatgatgtaatgaaaaacgtttgtagcgcaatgtatgtatttcacatccgccacttttattacttaagggggaacaagagaatgaaaaggtatgacgcgtttccagagccaattggcggctatactgtcggccgaagccagatggattttgagtacacggcaccagatcatacaaaaagagaactgacggcgtttgtgtactatccgtccgacagcagcgaagggaagactacatcagcgtacatgtttcctgaagtctgcgaaatgcttgatgagcagccgcttctcactgcgttgaaggatgcttacactatagatatcaagacccaatgttacgatggccttgctctctccgggatggaaaaacgctatccggtgttattttatgtttgcggcgggggctgttctccagaatggggtacagtgatctgtacagacttggcaagcatgggatatgttgtggtaagcatcggccatcagaatagcacgatgtataagcgtaaagatgggcgcctgtttaatatatcaaaggatttttcggaaattattatggcgttttctgaagatccggagatgatggcgttggctggtaagatggagatgcgtcctgacgatgaaactgccattgagatgtgccaaaacgtgcttacactgccgatacttgacaagttaacagagtatagtgaattacaggcagaagatgtaaggtatgcagccgattatcttgtcaaattggactctggagagctgaattccatctttaagggcagattgttgcttgacatcggtatgggcatagtcggacattcttatggaggggctacgacggcgattgtttgccgggacgacgaccggttcgcctgcgggattggcttagatagcggagcgttcggccttcagggcagcgaccttaagaaaccctttttgctgctgttttctgaaccgaactataacatgaatgcgatcattggcgctaacaatagcatggatacctattatttctctgttgatcgtgctgcgcatttagattactgcgacatcgtgtttaccagtgtgaatgaggaacttagaggcgaacgggatgccatggagatgcgaaatcttgttacagactatacgaagaacttttttgatcattatatactgcagaaggctgcaagtgtggaaagtctggcatacgatggcgtggacttgatcaagaagaccagcaacaagtgacataaccgattaaaatactcaaactgaaaaacctttatgaccaatttaatttattaaggacgtggaggttttttaatattaccttacaaaaaggggacgctcttataatatgaatccacttttatattctcttcacaatttctagtttacataatatatattctaggaagttaaatctttgatgaaaattctgtctcgttatcttaagtatacttagttgatgagacagaattaaaaaaataggatgtattacgatttgtatttatttcttactgctttacatagcatcgatctttataaattgtttcacactttacttcttccacatcaactttgccatcggataatcttgtgtaaacataaacccatttttcatttccgtttttaataaacatgtcgaatttaaaagcgtcagtatatttgtccatgacccagatcaatcccggaagagtttctgcttttgctggcgacacagaaaccaataatgctccagcaattacagccgcaccggctatttttttaattttactttttaacattaatattgcccccttgtgatttattgcctgctgctttctcacttagcaggtaatctgattttaccatcttgtacaaagggaatttgtcatattttgtagatcagatacttattttcactaaaaatacatatattgtcatgaattttatccgaataagatctcttcttttttgaaagcgtacacaaaaataaaatcatgtctggtaatactccgacgattttttcgcatcggctcctcacatatgagctgagcaagtatgacagccgccagcccgagcactgccgcgaaataaaatccggccctgagccccagccaatcgttaaaaaatccctcgaccaaaggtcctccgaaaataccgagtgcataaagcgcctggtacgcccccatcgatgttgctctcatgtctgccggaacagactcaatcgacattccaagcagcaaaggaaagataatgtgagtgaaaaacctattaaaatctgaaccacataaagcgccatcgggctgatggtaaaaggaatgataaaaataaaaacggctgcgagtaaataaaacagctttaatgttacccagtttccgcacctgcgaactaacgttcctatcactagcggagccagtgcggggggagtcataaacgaaaagacaacaagctgatttctttctcactgacacctatacgcagcgcatatgccgttgtgaagccaaacattttcgtaaaaatcatgtcacgggctaaaatggataaaaacgagattttcagcaaggacatatgcccggctgccttcaccataccgctcaatgtaacaggtatctttgcggtcgttttcatttcgcgaatcatgaaagacaggcaaagactggcaagaccgaggctgcgtcctatcctcattcactgacaacataaccgctcatgtcatcccggacagctgagctaacacgagaataaatgagatccagcggatgactcctttcgtgtcatccgccgcaaaatagctcgcaaataaaatggtgaatataacccatgtagatgagaaaaatccgcctgatgatcagacggctctgcagcttgttacttgcttcggttacctgcggaagcgtgagtgatccgataatgcacagttaaaaatttcagtccgaacagccacatatgatgaacggccttcaggctggtttcgctctgggctgaaataagaaatgtctctgccagcggaagatgacacgccccccatttcgtctgcagataaatcccttcatcacccgctccgctttttcgccgtctgcttgtcaaaataagattctgcttacgcgcataaggttttaaaatgcccgtcatttggccgtacggcagcggaagagagatattcatgtatccttccccttttgacctgtacgctgaatacagcgcagtaaaaacggtttcctgcttttcatttgttctgatccacgcacggacattttttctgccatctttgtcagagtcaactcctataatatcactgtgcatgatataccaatccggattcatggacaggtgaatctgccccgctcttctgctgaacggctcgtacatgcgcgcgaatggacgaaaccatctgctccacgtcacttttgccatgatgtcataatcaattgtctcttcataaaaggaaataacggccggcgccagtttttcagttgaaaagtcttcagaatgcagttctctcagctgatccagaaggccggtataatggatgtcatttgctgcatgaatatcagtcaaaaattctttgcctatcgttctcttcccgtaaatacggctgaacgttctttcactgccctcatcaaacggtctcggattttccaacctccaccccgccaaagccggcaggataacgccgaatgcattgacggccccgtgaatccaaatcatctggctgatcgtgagcgttgcctcctcgcggtagacaccgtacgaatatatcaaagaaaaagcaattgtgatcattaacacagccgaagaactcctgatcaagacccttcctgttttcgtaacaaacggccccgtaaagacgagatatgcatttacatacagacccgccagatacagggcgacagcaatcacatcaagtgtctttgaaaatgtaatccccaaggcaataaggatcggcgaaatcaaaataatgaccgtgctccactggtaaagttcgcgtttctcccgtatgatcctgccgagcaatccgttaaagatcggaatgaggaaagcggaatagtgaaagtgcaccgccgtcagcagaacgataagcgggccgaaattcatgacgggaatctcaaggacatatgcgaagaaccagaatccgcccccggccaaataaatgaaacccgccataacagatatctcttctgttctgtgaatatttgttttcgtcagccgccggacagcatacagtgccagcccaagcgtataaatgagccacacaaaggcaaaaaaactgaagcctgtgacaagcgcaagcgccgcacatatagcggcaacaggataactccgtaacaacacattctctaaggtctttgacggccgaaaagcaaaatcgaatacagcaggaacgaaaaaaagtacggaaaataaaacaaacgtctcagcagctgatatatgcggagcttcagccgccgcaaatcccaaaaagcaaatcacgcttaccatgagataacgcttcagcatgtttctccctctgtttcccggaaagtcccccggtaagagaaaagcgtgccgagtatccgatttttcacatgaacctttattttgaagcaattcatttcctcatcataagcctcataaacggttgaactgccgcacagccatgccggaagcgggattttctttccgcctatcaggagccactgccttccggatgtaataacaagccctccgtctgaagacgcttctaaatgcagttcagacagtaggatgcggggttttccgaagtaatcaagaattctgttttcccgctcatcatattccatgactgcatcaaaaaaacgcgttttgcttttaaagaaaaaggtacgattccattccacgccactttgcctgtttttgttttcgatagtgaaagggatatcgtttcccctctctgagaaaaaacatctgaaaaaaacacctgtctttaaaagcattctgacaagaaaagaacctccctttatttctgacataacgccttctccgcaaaacgtgcgtgattcgtcaaatctgtaccgtttctgcagcatcgggtgcagtgattgataatgagtaatcgctttttcatacattgaatccgtcatttcacttctctctttcgttttgtatgccaggcgctcggcagcttgagcttaagaatcatgccggctatcgtaagcactcctaatgagatcacgaatccgccgccggaatataacagtgccgttacacaaaagaagactgactgcccggcgtgaatcagccactttctccgcatgggaagcagccataatacccctaaccctgtctccagcgctcccctcacgatctctgcatcggcacagccatcatgaaatccttgaaaaaaccaatacagactgaatacgagacacataaagacatagacaaacccggaacggactgatatcttcggatgtctgttttgttctatccaaagccgcaacgcatcaaaactccatgcggtagcccagcttagcagaggacgaaataaaaaccggtctatccaacttcccggcagaccgcgggccgtttcatattgatattgagtcaaaaatgcgatttggccgttatcccgctctatatacttccagtagcccctgccttcttttataagtgccagcggatgatcagaggcaaaagcgagcgaagacactctttctgacgagcgaggccttatgtcacctattgattcgcccgtgccggataccttcagcccaaaaccgattcgtgtttcatatagaaacctctgcggttcatctggcagcctatgaagatatgtaatgtcagaaaaacgcagatcccattccttatgaagatgcgggttttgcgtatattcccaaagcgtttctatatcagatgcaatattgatttcgacatatatcggcttctgtttcatgccccctcctctccccttcttttgtaaacaattcctatattatcataggaacagatcaagcggcagaacgaaaaggccatcccgttatcggcaggacagcctcagtggctttgatgacttatgaataaggtatcgtgtcttttttatctttagaagcgggttgaatgataatcggacgcacgaaacagattaccgcagccgaggccaaaacggctaatccgcctgcaagcaaaaacgccccggagaatgatccgcttttgtccgcgataaagccggttaaagcaggcccgataataccggccgtgtttgcaagaaaatgcataaagccgccgactgacccgacattcctttgatcaaccacatcatgaatcaccgcccaatagatagagcccgttatatataaaaagaaaactgataaagcaacgagaataacggcacttacggtagtggtaacaagtccggcaaatccgatcagtacagcggaagcgaacagacaagtgacaagaatgactttccgtgagaacaaaaccccttttccggcggtttttttgaatacataatcagaaatcattccgcctgccgccaaaccgataaatccaagaatccaaggaataacagtcaccacgctcataaattcaacacttaaaccgcgttctttcaccagatagctcggaaaccatgttaagaagaaaaataaaatgtagttgtaggcgaaaaaggcaaaagccgtgaagagaatcgttttttgtttcaaataaaaggtcatcgggatatgctgctcatgcgactgaatctccgctttcattgccggagcgtcttccgtcggcgccggccgttctttgacaaatttaaaccagatgaccgcccagactaaaccgatgatcatgatcaggacaaaggaaaccttccagctgaacgccacagcaatcatcccgacaatcgggccggagatcgctccgccgagcggcgttccgctgtttgtcaggccgatgaccgtggcgcgctgagacggaggaaaccaattgttgaccattttgcttatggcagccgacagcggcccctcccccataccgaataaaacacggataatcaaaagacttacaaatccgaaagcaagcgcaaccgctccgctgaaaagagaccaaacgatcatcgccgtacacaatgtcaatttagccccgtaccggtcagatgcaacaccgccgagaaagttaaacacagcgtatccgacagaaaaactgctgaaaatcagccccatttgggttgccgacaatgtgagatcctgctgtatgaacggcgctgcaatagacagcgctgagcggtctaaatagttaatcaccccggcagaaaataatagaagaataatagggaatctatcctttgagaacataaaatccccctctcatcatttcataatattcagacatttaaattgccggagtaaaccggtttatgcaatgaaaccggttatccggattgccttgcgagcagcgccggtttatagcggtgaatccgtttttcaccgccatctttttcttgtatctggcgaagaagaaggcttcccgcttttcgcgccatttctgccgcaggctggacgatcgtcgtaatcggaggagtaaaaaaacccgcaaaaggaacttcatcaattccgatgacggctgccttatccggaattgtcatatcatgctccttcatatacttcagcacctcaacaagaacgatatcgtttgccgccaatatcgctttcggaggctcctgaagtgagaatagctctgacaaaacattggaaatatcagccgcatcggctgttttgatatattcgttccgcaccatcattccgtggcggtcaagcgccttcttatacccttcaatcctttctaccctcggactgatttcccgaataatggacgtcgtaataatcgcgattctcttaatgccgctttcgataaaccggtcaacggcaagaccggctgcatgatgattatcaagcatcactgtcggaatcccgagttcttcaatggttctgtccataaacacgaccggaaacgtatcgcgtttcatcttttcatataaagagagattttcgcccgtcggaaaaataataattccgtccacctgcttggcccgcagcatttcaatatatttcttttctttttccggttcatcatccgcattgcagacaataatatgaaatccttgttcatgaaaatagtcttccaccgccctgatgacctgagtggaaaaggtgtgaagaatattagccaccaccacacctactgtaaatgttgatttctgttttaagctgcgggcgacgaaattcggctgatagttcagctcttgaatggccgcttctattttttgtttcgttttctcgctcatatagtcatagcgctgatttaaaaattgagatacggtgcttttagatacgtttgcatatttcgccacatcagaaattgtaatggttttcatagactcatccccgtctgtcttcatttttcactagtataagtcagaagtaaatagtttacaatctgactgggacatgggttctgtcacactccggaataagccataaaacctccgtcgacgggaacggtgacccctgtgacaaagcctgagcatgaatcatccgaaagccacaggagcgttcccagaaggtcttccggtttcccgaaacgtttcatcggtgtatgtgccataatcttattggatcggtctgtcagacttccatcttcctgtaataacaactcacggttttgcgctgtcaaaaagaaacccggagcgatggcattcacccgcatccctttttttgcgaaatgaacagccatccacatcgtaaaattctgaatcgccgccttggccgcgctgtaggcaggcacctttgtcatcggtgtatacgcactcatagaagaaatattaataatcgtgggacattccgccttcaaaaggtcttttccaaacacttgcgatgccagaaatgcaccggtaaagttggttgaaaatacgctggaaacccccgtttcgtccatatcaaaaaaggatgtgccctgctcatcctcttcatacgtctcgctggcagtgatcgcattagggtggtttcccccggctccgttaattaaaagattgacagaaccgaaccggctgataatctcgtcttttgccttttcgagcgaatcacgggctgaaacatcagccggtacagaaaccgcggttcctccagcgtcagcaatctcgcccgccgcacgctctgctttatcagcattccggctgacgatcgcaattttcatcccctgccgtgaaagctcctttgccattgctgaacagagaacaccgctcccgcctgttatgacagcggttcttcctgataaacgttcatgaatcggtttcatctcttcacccctttctcatgagacgagaacgcatcccacagtccgttcaagtacataattcctaaggcacgatcatataaaccataacccggccggcattgttcgccccagatatgacggccgtgatcaggccgtacatatcctttatagtcttggccgtgcaattcttttaccacagcggtaatatcaatggacccatcactggtaagatgcgaagtttccgtaaaatcaccgttatcgcagattttcacatttcgtatatgggcaaacggcgcagctcccgcatagtgtttggcgatcttcaccatatcattggcgggatccgctcccatcgaacccgtgcataacgtaatacaattggcgggtgaatctgaaatctctcgcagcttttcataacttttctcaccggtgataatacggggcaggccaaaaattgaccagggcggatcatccggatgaatggccatttgaatgccgtgttcctccgctacaggaagaatttcgtgtaaaaagaactcaagattggcccaaagctgtttttcaccgaccgtttgataggcctcaaacagttccttgatccgggccattttctccggctcccacccgggaagcgtcaaatcagaagattcttcaaccgtgcggatgagttcctccggagggagactttccactttcgctttttcaaaaaacagtgcggttgacccatcctccagcgcgcggaacatatcggtacgcgtccagtcaaatatcggcatgaaattgtaacagatgactttcacgccgaattcggacagattgcgaatggtctgtttatagtgttcaatatattgtccgcgttcttcatgaccaagtttaatggcttcatgaacattcacgctttccacgacctctgcatgaaacccataggattgaatgactctgacttccgcttcaatgtcctccttttcccatacttcgcccgcgggcttctggtgaagagcccagacgatgcctttgaccccgggaatttgtctgacatgttcaagagtcaccgtatcattaccttggccataccagcgaaacgtgatattcatgttacacccccgtatattcgttttttcggcagacgtattctttgctgagggatacggcagcttcatagccgcccttttgatatgcttttgtcaagtcgcttcccacaccgaccgcgaccgctccggcagagagccagtcattcatgctgtttaatgagatgcccccggtcggcataatgcggacattcggcagaggaccgttgaccgacttgataaatgaagggtcaaacgaattagcggggaacagctttaccacatcacatccggcttcgagcgccaaagccatatcagacacgctcatgcatcccggaagatacggtacgctgtactggttgcatagagatgctatctcttttacaaaatgagagctgacgataaatgaggcgcctgataaaatggcgtgtctcgccgtttctgtatccattacagagccggctccaagaagaatatcttgatgccggagttccttaaagacatcttccacttcaggagttgtgtatgtaagctcaatggcgctgatacctcctgaaatggccgctcttgaaacttcaagcgcctcttggctgttttgtccccttatgacagccaccacttgtgcatgcagaagtttttcgtaaatagcgtacttaggcagcattctcgctcctcctttaatcaaacgtaatgattgcttttcccaccttgcccgggtgctgttcgatcaactgaaatgcttgatggacgtcatctgctgaaaatgtatgtgtaataagaccgccgtgcgttaacaggcctttattcagtaagtctgtaatgtacggaaactgattcgtctgcaatcttgaaccggttatcgtgacttccttttttgtgatcggaagctgagaaatgccggcagtcctctcatcaaaaccaagcacaaccacatgaccggccggagaaaccgcgtcaatggacgtttcaaacgttgaggggagacagacggcatcaatgacaacattggcgccttcattttctgtccattcgttcacccgcaaaacgggatcttctttttgcgcgttgacggtaacgtccgcaccgtttttttcagcgaatgccaagcgttcctcattcaagtcggttatcatgacggaagcgcctttgaactttgccatttttaatatgcagattccgatcggtcccgctccctgaaccaaaacggtatcttccttctcgacacggcctctccaaacggcctgggcgccgatcgtatatggttctgccatgaccgcttcctcccagggcagatcgggcgaaacggcatgcagctgcttttccggaaccacgatatattcccgcatcccgccatcttcatgaacgccgaacaccgaaagcgctttgcagacgttcggacgtcctttccggcaggcatagcatgttccgcaataagatatcggttcaaccactacccggtcacccggcttgaaacgccggacatgagaaccggtctttgcgacttcccctgtgacttcatgtccgattactctcggcagggacgctaacggatttgtcccatgataaatatgcaaatctgatccgcaaattccgacccgcttcaccttgacaagaacatcatccgcatggacaacagacggtttctcacattccgtcactaccagatcaaatgctttccgtactagaaccgctttcattttctcacccgctttttaagttgtgcttgctaccgttcaatcacagtctctttgtttacaaatgacagaacctcttctagatagggaagcccttcattgtcaccggaaactgtggtgacgagcgcaccgaccgcattggcaaactccaggcgtttttccggttcaaaaccatgcagataactgtacaggtagccggcattaaagccgtcacccgctcctaccgtgtcaacaggcgcaaccgggaaagcctctttgtgaacccacttatgatcatgatacagcgcagaacctgcttcaccgtcttttatgacgagctgactgattgaataggtctctgcaaaccgggctaatgcttcattttcccctatacctgtcagctgtttcatttcgtcccggcccgccagaagaatatcagtatgcggaaagatttgatgaaatgccgcacgcgcctcctcaatcgtccacagcttcagcctgatattcggatcaaaagatacgggaatctttcttgctttggcgatggaaagcaccctttcagcaatttcaaggtttttcttatcaagcgcgaggaacacaccggtaagatgaacgatgtgaatgccgtcaaacatattctctgttatatcttccggtgcaagagtcagaattggtgaattgaaacggtaataaaacgtcttgcctgaaccgtcatttctgatctctttgacatttaaagatgtaggaaagccttcaacataggagacgtcagtcacatcaattccttctcctctggcaaactgataaatcactctgccgaactcatccttccccagtctgctgacccactttgagtgcagattcaacctggcgcatgcaatcgcaaaattcagttcagctcctcctgcttttcgttcaaaatgggtaacaaaacgcaaaggccctgtgcttgcgggatttaaggtgatcatcgcatcaccgatcgtaaaaatgccataatcagaagccacatcaatactcctttcttttaagactaaatcggtttgataaaccggtttagtaaaactttatatgaaaacccttacacacacaagagaaaaatacagtaaattcaaaaaaatctattttcggtaaaaataacccggtttttcacatgaaaaaacccctcacaacaaaatgtaaggggttttttgaaaattgtatgcacgtttccttagttagcagtcttacgttcagggcttgtaccttcttcttccgcccatgtttcaatatgcttgagctccggcgtattctcggctttgaatacaggatcaagaccttttttgcgctgagcggcataatccttatagatcttgtaggctacattactcagcagtaagattgccactaagttaatgagagccaagagtcccataaacaagtttgccatgtcccagacgatctggaagtcagccaaacatccgtataccaccatcactaccacgaatacgcggtaaatattaagccatgttttgcttgttttaataaattcaatattcgtttcaccatagtaatagttgccgacaactgaactgaatgcgaataaaaacatcgcaatcgcaataaatgtcggggcccagccgccgaggtggtgctgcagtgcggcttgtgtcacttggatgccgtcgcctttaggcgtaaagctgtacaataaaatgataaaagcagtcgatgtacaaacgataaatgtatcaaaaaatacgccgagcgtctgaattaatccctgcttagccggatgcgacacatgtgcagccgctgcggcattcggcgcgcttcccatacccgcttcgttagaaaacaggccgcgctgcgctccgataataatgatgcttcctaagcttccgccgacgatctgttcaagaccgaacgcatttttcacaatcgtaacaaacagctcaggtaccgctgtaatatttacaatcacgacatacagcgcgatcagaatatacatacccgccatgaccggaacgattaattgcgaaacggaaacaacacgtttcagaccgccgaatataatgaaagccgttaatacagctaaaatgattgcgataactgttttattcacatggaatgcttcgtcaaacgcgacagaaatcgtatttgactgcacggcgttaaagataagtccgaaagaaacggtaatcaatacggcaaataaaataccgagccagcgggcgcccagtccctttgccatgtaatatgccggaccgccgcggaattcgtcaccggaacgcactttatacagctgcgccaaggtgctttccacaaagctggaagccataccgacaatcgctacgatccacatccaaaatactgcgccgggaccgcctgttgcaatcgccagcgcgacgccggtcaagtttccggttccgacacgagaagcggctgagataaagaatgcctgcattgaagatactcctttatttccttgcggcttctccccgacgattctgaacatttcaataaagtattggaattgaataaagcgaaaacggaacgtaaagtacaatccgatcccgactaaaatataaacaagatacttccaaataaaatcatttggaacatttatgatttcactgatgaaagcctccatgtttaacctcccttttacatatcttttactgtcatttttgctgcatatgttagatcttttaacacaacgagtattattatatcacaacaacagtggttgagaagtttttttaagaaaatgtttcggtttcttcatcacgtcttttgctgtcatgccccgttttttatcttacagcccgaaaaatgttgtcacgtcataaggaatgcgtgcatatcataacaaataggtctttaagaaaaaagagatgaaaagatggatggaatggtatatacttaaccaggataataattttttaaatttaataaatatgtttactttacatttaaattagggtattataataaaaatattcagacttatgaaggggggagaacatttgaaaaaaatcttgtttttaaaagcttctattttatttttagcgattgcaagctttcatttgctctccattccccatgcgtttgatactgctcatcattttaaagcggtagccgaccagcaggaaatgcacgaaatgaaggccggccaaaatgctgatgatgagaaaaaatcgctgacgggctcatatatcttgacggcgctttttgccgcttctgtctcactgatcgtgatatcagacaggagacgccccgcttcccggagaagacagcgaaagaaaagctttttaatcgctaaattttatcagtcctcgtatttcgatgagcttcatgttcaacatcgcctatctatgtaacataaaatgaggaggttgttaaacatgttgtttatcttacgaatggtgattttagggttgttttcattcaccgcattgaatttatttgtatggcagggaatcgaagtcattcacgctatcactgacttattcggcaaccatgaaagctaaataataaaacctccgctcaatgagcggaggttttttttattttatttttacttttaaacatcagacgcgggtatacgccatacatctgttaccggccctgtctcatcttcatcggtaaagaaggaaccgttgctgtatcggtcattcgcccgcaaggacttcacggcgatttcgattctctcgcctttttctgtttccgcagcgatcatgtcggccaaagcgcacgcgaatacgccgacaacacgatgcgggttctttttaagttcacgcagcatgatgacaccgcgcttcgctctggatgttttttcgaattcagataggttcatccgcttgattgctccccgctgtgtgacgaggataagcgaatctgtctcatgcaggatttgccctgatacgacggtatcaccgtcttttaaatttatgccctttacgccggccgcacgggcaccgactacatttacttcatcttcaccgaaccataaaccgtacccgaggcgggtggcgataaacagctggctgccgccgtctgtgacatgaacatcaatcagctcgtcgtcccctttaaggttaagggcaacaagcgctttcgagtaacgctgcgctttgtaatgcgtcatttcagttcttttcaccatgccgtttttcgtcataaataataaatatgaagatggatcaaattcttttaccggtatagctttcacgatggtttcatcacggtcaatcgtgatgatgttcgttacgtgctgccccatgtctttccacctgatatcaggaagctggtgaaccggacaataaacatagcttcccttattggtaaagagcaggagaacatccgttgtattcatttcaaattggtgaatcagcctgtcagtatccttcataccgaaatcctggccgttagaagcggcaaatgaccgctggcttgttcgttttacatagccgtcttttgtgactgtcacatatacgtcctcagaggcaaccatgacttcaagattgattttaatttcctcaatcttttcttcaatgacagaccgtctgctgtcagcataggtctttttcaattttttcaggctgcttgtaatgacttttaacagctttttatcatgacttaaaatggcttcgagctcctgaattttcttgctgagctcttccgcttcctcttttaacgccgtaatatccgtgtttgtcagacgatacagctgcaaggatacgatagcttcggcctgcggctccgtaaatgcgaatttagacattaagttttgcttcgcatctttcttgtcgctgcttgcccggatgacggctatgacctcatctaacacagacagtgccttcatcaatccttcaacgatgtggtgccgctcttttgctttttgcaattcaaagacggagcggtttgtcaccacttccttctgatgggaaatatacgcatccaggatggccgtaagactcatcagcatcggccggcggttatgtatggcgaccatattaaagttatatgttgtctgcagatcagtgtttttatataagaagttcaaaatgccttttgcatcggcttctttctttaactcaacgaccacccgaagccccgtgcggtcagtttcatcccggacttcagaaatgccttcgacttttttgtctatgcggtattcgtccattttctttacgagattggctttgtttacttcaaacggaatttctgtaatgacgatctgctcccgtccgcctcttacggattccacttcagccttgccgcggataataattttgcctttaccggtttcataagccttccgaatgccgtcgactccttgaataatgcctcctgtcggaaagtcaggccctttaatcacctgcatcaagtcatcgacggtgcaatccggagattcaatccgtttaatgacggcatcaatgacctcacccagatgatgagggggaatatcagtcgcatagcccgctgaaatcccggttgatccgttgacaagcaagttagggaacatggcgggcaaaacaaccggttctttactagtgtcatcaaagttcggaacgaattcaaccgtatttttatcaatatcacgcaaaagctctgacgcgatagaagataatctcgcttccgtataacgcatggcagccggcggatcaccgtcaatgcttccgttgttgccgtgcatctcaatcagcacattccgcactttccaatcctggctcatccgcaccatcgcttcataaacggaactatcaccgtgcggatgataattaccgataacgtttccgaccgtttttgccgctttacggaaatttttatcgaatgtatttccgtctgcgtgcatggcgtataaaattctccgctgcaccggctttaaaccgtcacgggcgtcgggcagcgccctgtcttgaataatgtatttactgtagcgtccgaaacggtcgccgattacttcttctaacggtaaatcatgaaataattctggctgtgccactattaaacctcctcagcgaccgacaagttttcattttctaaaatattgctttcctcatctaatccgaaggcaacattcttttcaatccattttcttctcggttctactttgtctcccattaatgtcgttacgcggcgctctacccgtgccgcatcgtcgatcttgactctgacgagcgttcgcgattcgggattcatcgtcgtttcccagagctggtctgcgttcatttctcccagacctttatagcgctggatggtataccctttgccgactttctttaaaacgccgtccatttcttcgtcggaccaagcatattcaataatctctttcttaccgcttcctttgctcactttgtaaagaggcggaagggcgataaagacttttccgtgctcgattaaaggtttcatatagcggtagaaaaacgttaacagcaagacttgaatgtgcgcgccgtcggtatccgcgtccgtcatgataatgatcttgtcatagttgatgtcgtctatctcaaaatctgcgccgacaccgcctccgatcgcatgaataatcgtattgatttcttcatttttgaagatgtctgcaagctttgctttctctgtgttgatgacctttccgcgaaggggcagcacggcttggaatttccggtctcttccctgttttgcagaacctcccgcagagtctccttccacaagatacaattcattcttcgccggatttctggaaccggccggtgtgagttttccgctcagcgtcgcttctgattttttgcgctttttgccgcttctcgcttcttctctcgctttacgggctgcttcacgggcctggctggctttaatcgcttttttgacaagcagggttgccgtatcgcggttttcttccaagaaataagcaagattctcggaaatgacggcgtccgcggcggatctcgcctcacttgtgccaagcttccctttcgtctggccttcaaattgcagcagttcctccgggatacgcacggaaataattgcggacaaaccttccctgatatcggagccttcaaggttcttgtctttctcttttaaaagggcgacctttcgcgcatactcgttaaacgctcttgtcattgccgttttggctcctgattcgtgggtgccgccgtcctttgttctgacgttattaacgaatgacagcatattttctgaatacccgtcattaaactgaaacgcgaaatcgacttcaatgtcatgatgctcgccttcaaaggaaaccacttcgcataaagcgtctttttcctcgtttaaataagcgacaaatgcttcaattccgttctcataataaaatacttcttttacgccgttccgttcatcaattaattctattttcaaaccttttaacaagaaagccgattcgcgcagacgttctgacagcgtgtcaaaattataaaccgttgcgctgaacattgacggatcaggtttaaaatgggtaagcgttcccgtttttttggtcgttccgattttttcaagtgaagtcacgggcttgccgccgttttcaaaccgctgtttataaacatatccgtcacgctcaatagtaactgtcagccactccgataatgcgtttacgacagatgcgccgacaccatgcagaccgccgcttgttttatagccgccctgtccgaatttccccccggcatgcagcacggtgaaaataacttccggcgtcggctttccgagcttatgcatcccggtcggcattccgcgtcctctgtcctgtacagagatgctgttgtccttatgtatcgttacgataatatgatctccgtagccggcaagaacttcatcgacggaattgtcgacgatctcatataccagatggtgcaggccgcgtgcgtccgtcgaaccgatgtacattcccggtcgttttctgacggcttccaggccttcaagcacctgtatggcatcttcgttgtaatcaaattgctgttttctagccaaacgtacaaacccctttcaaaaaacctgctcttaatcattctcttttttaaatgttttcatgtctttgtttttcagtatgcgcaagcttcggtccaattctcctcggactcacaattataaccaatatgcttgatttcgcaacatatttaagcgaatggctcgttttttaggccgcaagacatacattcgaacggcttttcatctttttggtgcccttttcggcggataagaacatgagttcgctttctattatatagctttatgcgggccatcgcaaacagactgtaaacccctgtataaaggggtttctaaaaaagctgttcatgctttattgtatctgtttcatcatcatacgcaaagagtattctttcaataaaaaagcaaaaacccctgatttgccaaggatttttgccttttttgttcctattttataacagcgcgggcgacttttatacataaatccataacagccgtccgtcctttgtctgtaatcatgcgatacgcttcttcatttgcaagaccctgctgcgcccaaaaaacgggagcgtccgtctgtaaaaattcttcagcgacgccgggaagctgctcagagcgtctgaatacattcacgatatcaatcggtccttccacgtcttttaatgaagcgacggctttaacgccaagcgcctcatcaatcgttggattgacgggaataatttcatacccttcatcctgcatcgctttggaaaccatgtaagaagtccggtcgggacggtctgacagcccgacgactgcgatccgtttgctccggtccagaatttctttaatctctgattttgaaggattttgcatctttaccatctccttttgatatattgtacatgaccgctttgccggaatcaaaaaaagcgctttgtcagcttaattctcaaaaaaacttgtcatcagacggtaacaactcgtgttaaaatagagtgaagggacattgaaaaggagaaatgtagatgttgattgctttattgattattttggcctatgtaataggcagcatcccgtcaggtttaatcgtaggcaaacttgcgaaagggatcgatattagagaacacggaagcggcaatttgggcgctacaaatgcttttcgcacgcttggcgttaaagcgggatctgtcgtcgtcgcagccgatattttaaaaggcaccctggccgcggcgctcccatatttactgcacatccccattcatcctcttctcgcaggggtggcagcagtgatcggccatgtattccccgtgttcgcaaagtttaaaggaggcaaagccgtagccacatcagggggcgtcctgctgttttatgctccgctgttattcgttacgatggttgcagtatttttcgtatttttattccttacgaaatttgtttctctgtcttcaatgttaacagggatttatacgattatttactgtctgtttgtaaaagacccttatttattaatcgtagtgacgcttttgaccgcgtttgttatctacagacacagggcaaacatcaaacggattataaacaaaacagaaccgaagatcaaatggttttgatgaaacttcaattttgacatcaaaatgccatatgcgtttataatagagataatttctttatatgagaaacaaaaagggagtgttccggatgaacatgaaagtaacgaaaggcgcgctggattggtacaaagaagagctcgatctggaaacaggcgaccatgtccgtttctttgtccgttacgggggatgcagcaacgttcagaaaggcttttctctcggcattttaaaagaccggccgatgaacatcggcaccagcacggaagttgaaggcattaccttttttattgaagaaagcgacttatggtactttgataatcatgatttgtcagtcacatattcagatcaggcggaagagccggtatttgattacgtgtaaaaaaaagaacgcagcggatgcgttcttttttttacagcctgaaccttttgagatgatcagtcagacgttctttttctaatatgcttctttgcgtatcaccgagcaggtcaaagtggggaaattcatttttatggtgaatccactccggcttcagcccatactccgctccccatctgatcagcttattgagatcgcttgaaccggccttcgtcacggtcttagcctccggaaagcggtcgtccagccagtaatgcgttaaaaaagcgattttcccttccgatacatcccgcttccacctttccagttccttacgcgtaattccaaatgccataactgcagccgctccttatttttttgccttttcgtaagcggcatgccaatcaggaaaagctttgcgaaactgaatcggtttgaagctctctttatcaacgcatatatgggaggatgtcgctttgatggcaagttcttgatccggattatagatgtggtagccgtaaacggttttaaatccgttatattcttcaatccaagtatgtacgacagccgtttctccgtagcggagcggctttttataagaaatgctgatatccaatacaggggacagcactcctctatcttccatatccttgtaaaggaatccgagttccttaatcagcgccgttctgccgacctccatccagactaagtaattggcatgatagacgatgcccatttgatctgtttccgcataacgcacttctatttctttttttgacacatgcaacgttctctgctcccttattatcagattagccccattttatcacaacgagccggaaagagaaaaaaaccaggtttccctggtttttattatgattgatagccgttttctcttgaagccgattcatcctggatttcactgcggaacgattcaatgctttcattgcgtctggcattcttctcttgaatgcgctgtttttcctcatctgtcgcaaattccattgattctttggcttcttctatattttcaattgtattctggaccatatcctgcagcttttcaacgttatcggagcggtcatccggattcggtttttgataattgtttgtcataatgtctgctctcctttgatgatgttattcgcctttcgtctgcatgacaatcggatgtccgtttgacttgtcatgaaacttttcccctttgttgcgtttatatttaacgggttttgtccctaagtggctcggagcgtattgcggctggccgtctttcttgtttatgcccatgttcatccctccttaagagtatattttgcaaaaggaggtgcaaacatgactgcaaattaaaggttatttttgtttgaaccgctgctccagcttttcttcaagctgattcaaatattccgtattggtcatcagctcacgtttattttccataaccaattcatgaaaagaacgttttcgcatttttttcaatcttctcacctccgtgttttcattcattttttccaatttttcaaaacctaagcccttcacaataaaaaaactgaacctctatttgagatccagtttttctttcatttctttttttgtcatcgtgcctacgcgaatgtgcaaaatggttcctttttcgtctaatatgtatgttgtcggataagaaagcacgttgaaatctccgttaattccgcttttgtcaatcagaataggaaaggtcagctgataatgatcagcaaatgatttaacagcctgtatatttttttcagatgatgtaaaattaacggctgctaccgcaatatcaggatattctttctgcagctcctgcatatcgggcatttccattcggcacggcttgcaccacgtcgcccagaaattgaggagcactttttttcctttataatcagaaagggagatgctttttcctgacaatgtatcaagtgtaaagtcaggggctttcatcccttcttctgtcccttctttcggacttttttgtacagaataaatgttccagcccgcatacactaacaacccgattagtaatattccgcccagccatttcgcaagcatcttaaggcctcccgcataaaaagagagaaagcagactgctttctctcctttgttcattctgctactgtttcattttatcgcgaagcaccatttgtaaaatgccgccgtggcgatagtaatcaatttccacttcactgtcaaaacggacaacgacttcaaatgtttttaccgtaccatcttcactgattgctctgacagtcagcaagtcacgcggacgtacagattcatcaacatccacctcgatgacttccttaccggttaagccgagtgtatccgcgttttcaccctgtttgaactggagcggcagcacacccataaagacgaggttgcttctgtgaattctttcaaagctttcggcaatgactgttctgatgccgagcaggtttgttccttttgcagcccagtcacgtgaagagcccattccgtaatcttttccggccaggacgacaaggcccgttttatcttctttataccgcatgcaggcatcataaatagatgtcactttcccggtaggccaatgtgttgtgtatccgccttctgtacccggtgcgatttggtttttaatgcggatattggcgaatgttcctctcatcatgacttcatggtttccgcggcgtgagccgtaagagttaaagtcacgaggagaaacgcctttttcctgcaggtatttgcccgccggtgtgtcttttccgatcgctccggccggagaaatgtggtcagtcgtcacggaatcgccgaatttgccgacaacgcgaagtcctcttaaaggctcaacttttcccggctctacagacatttcctcaaagaacggcgggttttgaatgtaagtggaatcctgatcccacttgtacagcgcttcatccgtcgtttcgatttcgttccagcgctggttgtcgtcaaataccgtttcatactctttgcggaataattccggcgtaacagtctgtttgacgagagaattgatttcatccatggacggccagatgtcatcgaaataaacattttgtccgtcatttccgacaccgatcggatccgttttcaggttgatattgacagtgcccgctaatgcgtatgcaacaacaagcggaggtgacgcaaggtagtttcctttgacaagcggatggatccgtccttcaaagtttctgttacccgacaagacagaagtgatcaagagatcatttttagcaaccgcttcttcaatctctggagaaagcgggccggagttcccgatacatgtcgtacagccataccctacgaggttaaagccgagctccttcatgtaaggaagcaggcctgagttgactaagtatccagtaacaaccttagaccccggtgcaagtgatgttttaacataattcggcactttcaagcctaattctaccgcttttttggctaccaatccggcaccgattaatacaaaagggtttgatgtattcgtacagcttgtaatagcggcgattgcaatcgcccctgttttcataaccgcatcttcaccgctgttaagtttaaatgaaatttctttgttctcttcagcagcatccgctccgaatccttggttgccggccgggctgacaagatgttttttaaacgtttcctgcataacggaaagcgggattaaatcctgcggacgtttcggtcctgaaaggttcgcttcgatttttgacagatcaatttccacaacgtctgtaaaaatcggctcttccgcgtcaggcgtatagaataaaccgttgttgcggcagtatgcttccacaatatcgatctgctcttcttcacggccggtcagacgcaggtaagaaagtgcttcctcgtcaaccgggaagaatccgcaagtcgctccgtattccggcgccatattggcaatagtcgcacgatccgcaagcggaagctcagcaacaccaggtccgaagaattcaacaaatttattgactacgcctttttcgcgcagcacttgagtgactttgagcgccaagtcagtcgccgtcgttccgttaggcaattttccgacaagtttcgcgccgatgacctcaggaacagggaaatatgaaggctggccgagcattcccgcttccgcctcaataccgccgacaccccagccgaggacgccgattccgttaatcattgttgtatgggaatctgttcccaccagagtatcaggatatgtcacaagttctccgtcttcctctttcgtatgaacgacacttgccaaaaactcaaggtttacctggtgaacgatacctgttgcaggcggaaccgcctgataattgttaaacgctttctttgcccagcttaaaaatttataacgttctgcatttctttcgaattctaagtccatattaatggctaacgcgtcttccgtaccggctttgtcgacttgtacggagtggtcaatgaccaggtcaaccggaatttcaggattgattttatcagggtctccgccgacagaggccatggcttttcttaaagatgccaggtcaactacggccggaacaccggtaaagtcctgtagaataacccgtgacggtttaaacggcacatcgatatcttttaattcagcagtaccccatcttgctaaattttcaacatgttcttttgtaatgacgcgtccgtctacctgacgcaaaacggattccaaaagaaccttaatagaataaggaagttttgaaacattgccgacccctgcgtcttccaatgcttttaatgaatagtagttgtatgtttttccatttgaagaaaatgtttttcttgcttggaaaacgtcttgtgttgcgactttttgctgatttgtcattctccaaaatcccccttcaatgatcaagatcgttctttagatgaatgttcacattccatcacaattttctcacaatttcatcttagtataaaatcatacataagtaaatatcaatgtttttattaaatacaataagatcgtcttatcagcatgattgtcggtaaattttgtccgattttccgcctcatacaacgggctgtaaagagccatattaatgttgaggtgatgatcatggtaaaacggaaagccaatcatgtaatgaacggcatgaatgatgcgaaaagccaaggcaaaggcgcgggctatatagaaaatgaccagctcgtcctgacggaagaagaacggcagaacaataaaaaaagaaaaacaaaccaatagccggaacaccttaaaaaaggaggctttaacttgacaaataaaaatacgagtaaagatatgcataaaaatgctccgaagggccataaccccggccagccggaaccgctgagcggaagcaaaaaagtgaaaaaccgcaaccatacaagacaaaaacataatacaagccacgatatgtaaaacagaccacggtgtctgttttttttgtgccattcacccattcaaagcttctgcatacgttatagcaaggctttttaatatggagggatgcttccatgaatcactcaaaaaacgctgaagaatttgatgatacggaagaatggctgcggcagttttacgaggacccgtatgcttggtatgacgagacgctgccgatcgatctatatgaaacaagccgtcaatatatcattgaagccgacctgacggcgctgaaacaggtgcaagcgataaccgtcactctttcgggaaatgagtttatgctctctgttaaaacgcttgaacggacgttaaacaaacaaatgatgcttcctttttatctgaatgacaaacatattttcactgatttcaccaaccatattctgaccgtctccatgaacaaggagccaaatgagactcctgcctctttttcctttcaattt

SEQ ID NO: 45 - DNA, 12771 bp, Bacillus amyloliquefaciens
ctgaaacgtttcaggcgctccagcacatccattcggtcaatcaaaaagagaaagggctttcggtttccagatttgtcgcgtttctcgatgggggcaggctgcttgccaaacacgctgatccgcttatgcaccgccggctgagaaccgcgtttatgacgcttttggaaacctttgcggaccggcatgaaaacgggctgaatcaccccgatttccggcgtgtgctcttggatgtgtcaaagttttcgctgaaccacctgaatccatggctcgaacaagccgatatagagcgtgagatgccgaaggtggtgtggtatggagacgctaccaaaagccagctctattttctctattatctcatgctgatcggctgtgacgtcctattgtttcatccggctgcggaagatccgttcagcttgattgatccggatgaggaactcagctttgtgataaagctccccgcaacaggcggccttgagccattcccgaaagaaaagccggacagaacgtccacgacggcctaccggtcaacgaaagaaattgagcatgtgctgaaccatgaggaatctatgatgtataagccttggcagttcagggatcataccccgcagtccgtgactttaaaaacgacgtatgatgagttatttctcattgcgaaggagcgggcatttatccggccgcaatttaaagcggacagggagcgggtggccgttccgaacctttttgcgaaagtgatgggggtttccaaagatacgaaagaatattggaacagactccataccgccgcggactatcaggagacacacatgatccgcagttttccgtttacggaagagctgaaagccaactaccagtatcactacagtcaggttttgaacgaagaaggagcaattgacgcggaaaggcttaaaagaagcaacatctggcagtacaagcacctcccgtcaggcgtgcagaacgccatcgccaatgtgatttctgacatgtgcagaaacccagggctgaaggctttgcccggcgagcaggcaagggatgccgcaatctatttgttccgccaggcgacgaacctgcccgcttcgctgctgcaattgattcagacgtttgattacgcccaaaccgttccgaaactcattttatatcatacggaacaaaatggcgaactcacacgttcggacgccgccgctctgttgtttttaaataaattcggcgtcgatatcatcttgtataatccgccggggcatcaagatattgagcactatattgaagaaagccaatttgatgtccattggctggaggacatggtgtttcggcaggaatataaggagccgtcactcgtaagaaagctgtttagaaccattacgcaaaagcagggagagtaaataaacatgacagaaaatcaaaatccgcttgttcttgataaaaatgaagagatttctgaacaaaaagcagatgacatcagggtgcagctgcgccaagaccctgaagtgcagcgcatttcgcagcaaattgacgtgaaaaaccaaatggagctgcttgagtacggaaaagaaccggcagttgaaatctcgaagttctccgaccgcatcttaaatatgatgaaaacaacaagtgtcacggattcaggcacaatgctgacgcagctcggaaaaatcatggaccgttttgacaaaaatgatttcgatgaaccaaaaggatttctcgctaaaatgttcaaacgcggcaacagcatgattgaaaagatttttcaaaagtaccgcaccctgggcggagaaattgaaaaaatccacgttgaaatttcaaaatacaaagatgaaatggcaaagacgaaccatacgcttgaagagatgtatgaaaacaacattaactactacatggagcttgaaaagtatgtcgttgccgggcagatgaagcttgaggaaatgcaggcgcttattccttcttatgaagaaaaagcggccggcggaaaccagcttgcgcaaatgcagcttgatacactgcgtgacgggcttcaggcgcttgaggaacgtgtctatgatttagatatggcgcggatggtggcgctgcaaacggcgcctcagatccgcctccttcagcgcgggaatacgaagctcatcggaaaaatcaattccgctttcgttattacgattccgattttcaaaaacggcatcattcaggctgtcacagtcaaacggcaaaagcttgtggctgattcaatgagcgagctggaccgccgcacgaatgaaatgctgaagcgcaacgctgaaaatatttcaaaccaaagcgtggagatcgcccgtatggcaggccgtccgagcattgacattgagacgattgaaacgtcttggaacacgatcgtcagcggtatgcaggaaacggaacagatcgaagaagagaacagacgtatcagagaagacggcgcgaaacggattcaacagcttcaggataatattaaaaacgcagttttaaagaattaacacaaaccccgcttgcttacggcaagcggggtttttttgcgaaaaaagataatgacaatgtgtaaagacaggtgtaaacttatacggtaatcattttcgatttgaggtgctgcttatgaacaaacaacctgccgtcactccgcgaaaacttctggcgattgccggaatgggctggctgtttgacgcgatggatgtcggaattttgtcgtttattatcgccgcgcttcacactgattggaatttaacgcccgatcaaatgaaatggatcggaagcgtcaattccatcggtatggcagcgggcgcctttgtattcggaatgctggccgacaggatcggccggaaaaaagtgtttatgatcacgctgttattcttttctgtcggaagcggcatatccgctttcgcaacgggattgacggtttttctcatattgcgttttctgatcggaatggggcttggcggggaactgcctgtcgcctcaacgctcgtgtcagaagcgtcccctcctgaaaagcggggacggatcatcgtgctgcttgagagcttttgggccgcgggctggcttcttgcggcggtgatttcctactttgtcataccgtcattcggctggcaggccgcgctgctcttaacggcgctggccgcgttttatgcgctgtacttgcggaaaagccttccggaatcaccggcgcatcaggcattgccgcagaaaaaaagcatacgcgggcaggcgggaagtgtctggacgaaaccgtatattcggccgacggtgctgctgtctgtcgtttggttctgcgtcgtcttttcatattacggcatgtttttatggctgccgagcgtgatgctgatgaaaggctacagcatgattgagagcttcgaatacgtccttctgatgacacttgcccagcttcccggatatttctctgcggcgtggctgatcgaaaaagcggggcggaagaccatcttagtcatctatttgctcggaacggcgggcagcgcttatttcttcggtgccgcggattcattggccatgctgctcacagcgggcatgctgctgtccttcttcaatctcggcgcatggggcgtgctttacgcctatacaccggagcagtatcctgcggcgatccgtgcgaccggttccggcacaacggcggccgtcggcagaatcggcggcattttcggtccgcttctcgtcggatcgcttgcagcccggaacgtttcgtttacagtgattttcgccgtcttttgtgcggccatcctgattgccgtcatcaccattctaattctcggaaaagaaacgaaacagacagagcttgcgcaatgagcacccttttggggtgcttttttagtgagctgtctgttgacagacctatatttttccttaatattccttattttcaggaggcgaaaacttctttttccgggacaatgtcgcaaaaaaattcttttatttgtaaaaaaaggataggaaatcagtttgcagcacattcgatggaaacgttctcaagcctgataaaagcccgatttcctttataatttatcctcaataaggaggattagagagtatttagaagcataccagaggaaaataagacacagggatgtttttaaagtgatgatacaaaataaaaagggattatgatgtttgtttgacttattacaaacgtgttacggtattaaagattgcttattatggagggaaaatatgaatttggatgagaaaccaattaagataaaagtcgaaaatgtatctaaggttttcggaaaacagacaaaaaaagccattcagatgctgtccagcggaaaaaacaaaaaagagatcctgaaagcgaccggatcaaccgttggtgtcaatcaagcaaactttgatgtatatgatggggagatatttgtcatcatgggtctatcggggagcggtaaatcaactttagttcggctgttaaaccggcttattgaaccgactgccgggaatatttatattgatggtgacatgataacaaatatgtcaaaagaccagctccgggaagtgcgccggaaaaaaatcagcatggtctttcagaaatttgcgctgtttccgcacagaacgattcttgaaaatacggaatacggtttggagctccaaggcgtcgacaaaaaagagcgtgagcaaaaagcgcttgattcgcttaaacttgtcggtcttgaaggctttgaacaccaattccctgatcagctcagcggaggaatgcagcagcgtgtcggacttgcccgcgcattgacgaatgatcctgacattcttctgatggatgaagctttcagtgcgcttgatccgctgatccgcaaagacatgcaggatgagcttttagaccttcatgactctgtcggcaagacgatcatcttcatcacacatgatcttgatgaagcattgcgcatcggcgacagaatcgtgctgatgaaagacggtaacatcgttcagatcgggacgcctgaagaaattctgatgagcccgtccaatgaatacgttgagaaattcgttgaggacgttgatttatccaaagttctgacagcgggtcacatcatgaagcgcgctgaaaccgtgcggattgacaaagggcctcgtgtagcgctgcagctcatgaagaatctcggtatttcttctatttacgccgttgataaacagaaacagcttctcggcgtcattcacgcggcggatgcgaaaaaagcggtggaatccgacttatcgcttcaggatattctaaatactgaatttacgactgtaaacgaaagcacgtacttgacggaaattttcgatgtcgtgtctgatgcgaatattccgatcgccgtcacggacgataaggaccgcatgaaaggcattgtcgtaaaaggcgcattaatcggcgcgctttcaggaaataacgattatataaatgttgaagattctgctgaacaagctcaggattcttctgttcagggggtgaagtaaatggacagattgcctagaattccgttagcagatatcgttgaccggtttgttgactggcttaccatgacgttcggaggtttctttgacggaatctcaaacggtttggccgctttcgtaaacgcgattgtgagcggtttgggtttcatcccgtctattttattgactgttatttttgcagctctcgcttggtggatcagtacgagaggaattgcactctttacgttaatcggattccttgttattgattatttgggctattggtcgccgatgctgcaaacgttggcgcttgtcgtcacctctgttttgatttccattattatcggggttccgatcggcatatgggcgtctcagaaagaaacggtccgccgcattgtcacaccgattctggatttaatgcagaccatgccggctttcgtatatctgctgcctgcaattttcttctttaatatcggggttgtgccaggcgtcgtggcatctgttattttcgcgatgcctccgacgatccgcatgacggttctcggtattaaacaggttcccgctgatctgattgaagcgacggaagcattcggttcaacgacgtctcagcgtctgttcaaggtccagcttccgcttgccacaaaaacaattcttgccggtattaaccaaagcatcatgcttgctttgtcaatggtcgttatcgcggccatggtcggtgcgccgggcctcggttctgaagtatacagcgccgtgacacagttgaaaaccggtgtcggagtggaagcgggtatcgcgatcgttatcgtagcgattacactcgaccgtatcacgcaaaacattaaagtgaagaagaagagcagggggaatgcctgatgcttaagaaaatcatcggtgtcggcgttaccgctgcgctggctctttctttggctgcctgcggttcgcagactgatggtaaggcaacggctgcggaccaggtgaacaaaaccattatcggtattgatccgggatcggggatcatggccctgacggatgaggccgtgaaggattacggattgaaagactggaatgtcgtcacggcatcaagtgctgccatgacggcgacattgaagaaatcatatgaccggaaaaagccgatcatcgtaacgggctggacgccgcactggatgttctccagatacaagctgaagttccttgatgatccgaaaaaaacgtatggaactgccgagcagattcatacgattactagaaccggcttcagtaaggaacagcctaacgcggccaaagttctcagccagtttaaatggacgcaggacgatatgggagaagtcatgattgccgttgaggaaggcgaaaatccggccaaagccgcagctgaatatgtgaaaaaacacaaagatcaagtggctcaatggacaaaaggcgcccataaagttaaaggggataaaatcaacctggcttatgtggcatgggacagtgaaatcgcaagtacgaatgtaatcggaaaagtatttcaagacctcggttatgacgtgaagctgacgcaagtggaggcaggaccgatgtggactgcgattgcgacaggcagcgcggatgcgtcattgtctgcttggcttccgaatacccataaggcatatgcgtctaaatataaaggcaaatatgaagatgtaggaacgagtctgacaggcgtcaagatgggtctggtcgttcctcagtatatgaaaaacgtcaattcaattgaagatctgaagaaataatgaagaaaagcagccctgtaacgggctgctttttttatgcttcaaacgatttgaggacggcggccgttaatatctcaactccagtaaagatggcgcttcggtcaaatgtcatttggggatggtgaagtcccggctccagaccgcatcctaggccgagcatcgtcgttttcaagttcggcacctttaacccgtaaaaatgaaaatcctctccaccggttgtcacaagaggttcatccagatgttcttctccgagaatgctgctgatcgcagatgccatgatggcttccgcctccttgtttcgctcggctgccgggaggctgtgttctttttgcagttcgatttttgcgccgaatgcggcagccgccgcttcacaggctctttcggtttcggcggttaatttctccatggcggcattggtttgtgcgcggagatcaaggctgaacgatgcttttcccggaatgatattggaactctctccgcctgcctgaagctttgtcatcttcacggaatgcgggatgccgggatcaagatgaatgaagctgagtttttggacgagaagagcggcgatttcgatactgttaaggccgagatgcggtctcgcgccgtgggcttcttctccgataatcagtccttctatatgctggcttgagccatgcagaatggacggtgcgcatcggccgtttgccgtttcctgtacggggcgcacgtgcacgccgtataagaagtcaacatcatccagtacgcctttttcaatcattttcagcgctccgccgcctttttcttccgccggctgaaaaataaagcggatggtgcccttcggaagtttcggctgactctttaaaagcatcatcgtgccgagcgccatcgtcatatgtgaatcatgtccgcatgaatggttcgcctgaaaggcaccgtccacttcctgccacagcgcgtcaatatccgcccggacagccacaacgggcgagccttctccgatttcgccgacaaccccggtacaatcatcaaacgtgcgggtccggcagccggcctctttcagtttttcagtcagatattcagttgtttgatattctttccagcttacttcgggattggcgtgcaggtggtcaaaaatatccataatgacttgcttttcatgcgctgtgagtctgttcatgccgtaagtcctccttcaaaagctgtctgttttttatttttgatattgaaaacaggcaatcggtctgtatataatatagcacatatctgtattttctgaatagtttataaatttaaagcgggatggtgatggtatggctgtgccgaaggccgaacctgtattgaaaaagaagaaattgtttgtgatgcctgatgcttatgtgctgctgttcattgtcgctttactatgcgcgatagcgtcgtacatcgttcccgcgggagaatttgacagggtgacaaagggcagtgtgacgtccgccgtcccgggaagctatcattctttagaccagtctcctgtcagcccgatcgcttttttcaccgcgattcaggaagggatgacaagttccgcgccgatcatttttttaatcctgtttacgggcggcaccattgcgattttggagaaaacgggcgccatcaatggattgatcagtaatgtcatcagtacgttccgcacaaaacagctgctgtttattgcgattgtcggatctctgttttcgatcctcggcacaaccggcatcgtcgttaattccgtgatcggttttattccgatcggcctgatcgtcgcccgctcgctgaaatgggacgccgtggccggagcggccgtcatttatatcggctgctatgccgggtttaacgctacgattttatcaccttcaccgctcgggttatcacaaagcatcgcggagctgccgctgttttccggtatcggcctgcggattgccgtctacatttgttttctgttatcatctattttatatatttatcggtatacgagaaaactcagaaaagcaaaggacgccagtctgctggggaacgattggtttccggcggcaggttcactcccgcaggtttctgagccggaggacaagcatgtcccgtttaccgtccgccataaattgattctggctgtcgcggctttgtcgcttgcaggctttttatacggcgcgcttactcttggctggtctgattcagagatggccgccgtgttcatttttatctcaatcgtgtccggcctgattgcgggaatggcggcaaatgatatcgcaaaaacgtttattacaggctgtcagggcctcgtttacggcgcgctgatcgtcggaatggcgagaagcatttccgttatcctggaacatggaaagctgcttgatacggtagtcaatggacttgcgtcactgctgcacggtttcagcccgatggcaggcgccatcggaatgtatatttccagcgccctgcttcattttctgatttcatcaggctcaggggaggcggtcgtatttattccgatcttggcgccgcttgccgatctgatgggtatcacgagacaggtcgcggttgaagcggttatgcttggggaaggcgtcgtaaactgtgtcaatccgacttccggcgtgctgatggccgtactggctgccagcggcattccgtacgtaaagtggcttcgcttcatgattccgctggcgctgatttggtttgtcatcggccttgtgtttatatgcataggcgtcctgatcaattggggtccttattaacatttttgtcaatgatatttcggtttatcattatgaatcggcaagatataatgggagttgtaagccattcttaatagtacgggaggaagtcatgaatcagcgtcggaacagactttcaaacgtgaatggaaagagtgagagtgtgaaagagaaagaacgaatgatttggtcagaagtcggaatgcttgtgggcacactgtctttgcttgacatcatcgtacgcggacttgttctgaactgtccgtttagggaatgggccggtagcttggcggttttcttcattataattgtttattattgtatcagggcgggagcgtcgggaatgctcatgccgagaatagacaccaaagaagaactgcaaaagcgggtgaagcagcagcggatagattcaattgcggtcacttttgcggtagcggcgattacgatgtacgacagggggtttccccatacattctttgcttggctgaaaatgatctttctttttatcgtctgcggaggcattctgtttctgcttcggtatgtcattgtgaagctgtcttacagaagagcgataaaagaaataaaaaagaaatcatcttgacaggtggtttctttttttgtttgaaagcgggaagtctttttaattgataggaatatagatttgaattcactctgtcacgttgctttgatagagagagtgtgataagttgaaatgtaagcgttaacagaattctccagtcttcacaacagttgaaaggagctgaagaaagagtaagaggaatttttgactccgcagtcagtcttcaaaaatgaaataaggagtgtcaaaaatgtttgaaaaacgattcaaaacctctttactgccgttattcgccggatttttattgctgtttcatttggttttgtcaggcccggcggctgcaaacgctgaaactgcaaacaaatcgaatgagatggccgcgtcatcggtcaaaaacgggaccatccttcatgcttggaattggtcattcaatacgttaacacaaaatatgaaagagattcgtgatgcgggctatgcagccattcagacgtctccgattaaccaagtaaaggaagggaaccaaggagataaaagcatgaggaactggtactggctgtatcagccgacatcgtaccaaatcggaaaccgttacttaggcactgaacaagaatttaaggacatgtgtgcagccgcggaaaaatatggcgtaaaagtcattgttgatgcggttatcaatcataccaccagcgattatggcgcgatttctgacgagattaagcgtattccaaactggacccatggaaacacacaaattaaaaattggtcggaccgatgggacatcactcaaaatgcattgcttgggctgtatgattggaatactcagaatactgaggtgcaagcctacctgaaaggtttcttggaaagagcattgaatgacggagcagacgggttccgctatgatgccgccaagcatatagagcttccggatgatgggaattacggcagccaattttggccgaatatcacaaatacatcggcggagttccaatacggagaaatcctgcaagacagcgcatccagagatactgcttatgcgaattatatgaatgtgacggcttctaactacgggcattccatcagatccgctttaaagaatcgtaatctgagtgtgtcgaatatctcccattatgcatctgacgtgtctgcggacaagttagtcacatgggtggaatcacatgatacgtatgccaatgatgatgaagagtccacatggatgagtgatgacgatattcgtttaggctgggcagtgattggttcccgctcaggaagcacgcctcttttcttttccagacctgagggcggaggaaatggtgtgagatttcccggaaaaagtcaaataggagatcgcgggagcgccttatttaaagatcaggcgatcactgcggtcaatcaatttcacaatgaaatggccgggcagcccgaggaactctcgaatccgaatgggaacaatcaaatatttatgaatcagcgcggctcaaaaggcgttgtgctggcaaatgcaggatcgtcttctgtcaccgtcaatacttcaacgaaattacctgacggcaggtatgataatagggccggcgccggttcatttcaagtagcgaacggcaaactgacaggtacgatcaatgccagatccgcggctgttctttatcctgacgacattggaaatgcgcctcatgtcttccttgagattaccaaacgggggcagtccattctttcaatgatcagctgacggtcaccctgcgtacaaatgcgaaaacaacaaaagccgtttaccaaatcaataatggtcaagagacagcatttaaggatggagaccgattaacgatcgggaaagaagatccaatcggcacgacatacaacatcaaattaaccggaacgaacggcgagggtgcagcgagaacccaagaatacacgtttgtcaaaaaagacccggcccaaaccaacatcattggctatcaaaatccggatcattggggccaggtaaatgcttatatctataaacatgatggaggcagggccatagaattaaccggatcgtggccggggaaagccatgaccaagaatgcagatggaatgtacacgctgacgctgcctgagaatgcggatacggccaacgccaaagtgatttttaacaatggcagcgcccaagtgcccggccagaaccagcccggctttgattatgtgcagaatggtttgtataacaactccggtttgaatggttatcttccgcattaatggatagggccatcatcacatcagcgtgccggcaaacccccgcttctgagaaagggacagcgcgtcttcattcacgctgaaaagatgacaacatcctaaaacg

SEQ ID NO: 46 - DNA, 43318 bp, Bacillus amyloliquefaciens
tgagccagttactccggttgcgccggtcgctccgatttctcctgttgatccagttactccggtcgcaccagttgatcccgtttctcctgtcgatccggttacaccagttggacccgtttctcccgttgagcccgtttctcctgtcgatccggctactcctgttgggccggttggaccggttacacctgttgttccagtcactcccgttgctccggttgttcctgtaattccactggggcccgttacaccagttggaccgatctctcccattggcccggtttctcctgttgaaccagttgaaccagttgctccggttgatcccgttacaccagtcgggcctgttactcctgttattccgattggaccggttacaccagttggacccgttactccggttaaaccgattgtgcctgttactcccgtcgacccggttactccagttgtccccgttacaccagttgctcctgttactcctgttgcgcctgttattcctgttgacccgcttactccggttggaccggtcaagccggttgggccggttactcccgttgatccagtcgacccgattgagccggttattccagttggtcctgtggcgccagttggaccggatgcacccgttgatcctgtgactcctgtcgctcctgttataccagttgagccggttgtacctgtggctccggttgaaccagttcctcctgttggcccggttgcacccgttggacctgttgctccagttgaaccgattgctcctgtcgatcccgttgctccggtcgctcccgttattccggttaccccagtcactccagttgcacccgttggacctgtggcgccagttgaaccagttgatcccgttacaccagttgctccggtcgctcctcttgctccggttactcctgtgggacctgtaattcctgttacgccaggttcacccccggtttgcgccaatgaaacatcgtctattaaaaccgtgccggtagaaactttacttaatacaatgacggcagaggccgcgccagaaggcacactgcttgttttatagatttcagaccatgtgtggaagagcacgttcggcaaatttccgggtgtaatattttcttgaatggaactgatttgttcacctgctgcgctgacatagatgatctggagagttacttggggacttggctcatttccgagcgttgcgagtgatacgaatagagtcactgacttggctgaaatgggaacgatttgactgaggtaagcatatggctgagctccaataaattgcgcagaatatctccctgaatgtgcaaacaaactgttaatctgggtatttgccgaactccaccccgctaatgtaccggtttcaaagcttccgtttataatcggattattcattcaatctttttccctctccttcccgttgttgaccgtcttacttattaagacagcatattaatacgggctgtgttttgacaacctaaataaaaaaggtgatttcttttcatcaccttaatccgatccttgaatggggaatcccgtcgcaatgagggagcggtttgccgctgcgacttgtgttacgtaattcgaagaaaggacggataaatagagctggtacgcggctgtttcatccgccttcatttcgtcaatgtacgtaaaaggaattcctatgatttgtccgcctgaagaaaagaggttccgctcttgtctctgtgtttgtatagatacgccatttctttgcagatcgacagctaagaccaatgagaaatgagacgcgagcggatctaattccacgtttacttgtatgacggcatccgttttcacaaattgatctgtcggcgcggctatcactgcgcttaacacgtttatcggtgttccttctaacggaatcatcatctggtctgctgtattttgaaaagctaccgcaggaaccgctcccggcggaccctcaggccccgggggaccgggcggacccgcctccccttgcggaccgcgagagccggcgggtcctcttttgccttcgggacctcgcagcccgggtacgcacaaggcagatcgattttcatctgaagacggaaaccgtttttccgtccctgtttccggtctttcatgttcacatggtaattgttcataccggcgtttcatatgtctgctcatatatttgtaaggtttctgtttcaatatcatgtattgattacggccgctgctcatattatcaccccggccatattctattcgcactggagtcatcatgtgtaggcccttccccttccttacagaaataaaaaaaggcagacctgagtctgcctttttcttctaccataatcctaatactttccaccataatccgccgatcacaagccatgtcacaatatggacgattgacaggataaagccgatggaccaccatttgctttgcgatatatagcccgctccgaaaaagaccggagccgctcctgagccgtaatgcgtcgttgaaccgaaaaggttgctgaaaaacgccaagctgagcgccgccaacagaggcggagcgcctgccgccacgatgacggcgagaaatgccgcatacatggcgctgatatgcgcggttgcgctcgcaaagaagtaatgcgtgtaataatacacgacaatcagaatcataaatgccacaatccatgaaaaaccggaaacagaagatttcatcatattgctgaaccaagacaccataccgagctcattcaggaaattcgccagcatcacaagcgccgcgaaccaagtcagcgtatcccatgcaccttgttcctttttgatgtcctcccatgttaatacctgtgacaaaagcaaaacggataatccgatcagggccgtcgtcgttgcgtcaatatttaagcttcctccgaaaatccacagcgcaagcaccaataaaaagacgatgaccatggagagttcggattttttaaacggacccatttctttcaatttttccgttgcgattttagccgcatccggtgtttctttaatttccggcggatacagcttataaatgacgagcggcgtaatgattaagctcgccaatcccggtacaatggccgcgattgcccagcttgtccatgtgatgtccacccctgcgacatcgtgggccagcttggcgatcagcgggttcgccgccattgccgtcaaaaacatcgcagacgtaatcaagtttccttgaaaaccggtttttaataagaaagcgccgattttccgctctgttccgtctgccggcgttgatccgaaagtttcggataatgatctgataataggaaaaataatgccgcccgcccgtgccgtgttgctcggaatggcaggtgataaaattaaatcactgaaaagcagtgaataagaaaggccgagtgttttcttcccgaaccgttgtacgaatacgtaagaaatcctggcgccgagcccggttttgataaatccccgggaaataaaaaaggcgatgacaatcagccagattgtcttgtttccaaatccgcttaacgtattttcaatagatagcgttcccgttaacgcggtgactgccaatgcaaaaattgcaattgcgcccattggcaagggcttggagataaagccgataattgttgcgacaaaaatagcgaacaaatgccatgctttaggttcaagtccggacggcgcgggaataaaccaaatgattaatcccacagcaacggtaataagcaaaggaataatttttaccgcctgctgtttttttgcgtctttttctgaagccattacaggtctcctcctattttgttgtcttccatcccctatcccattttactacttaactaagttaataaacgtttttgttaattaaaaaacacaaaggaatattttcctttgtgcttcttgtttattattttaatatgcccgacccggctttagatataacatctgattttacatttgatgatgagccgatggaaccgtgcaatgacggtgtccagccgacggactgacttaatccgttggcggctgacgcgttaatggcggcgccgtttaaaagagtgccgtcttcatgaagcgcttttccgccgctgaagacgctgatgactttatcagcagccagtcccggcacttcaaaaacattattctgggcatatattttcgacgcgtggcccgcgccccacgcatagctgaacgggtatgcggcgcttttagagcctgcgtaaaaattattataaatatgaacctgcccgtaccggacccgcggcgcgcgctggacgatgttctggtaatagttatggtgaagggtcaccttcagttttccctcatccgacgtcttgctgtcgctgtttccgatgacggagcctttgtcatggtcatgatatttattataggacaatgtaatataattcgccccgttggctatatccgtctggccgtcatggtgctgatattttctcccgtaatagtagggaaaaccgctgtcgggattcgatccgtcattaaaggtgcaatgatcgatccagatgtgcgtcgcgccgttaatggtgatattgtcatattccgagttccagttgccgctgctgccgtccgtcgggtcccattgcggaaaatagtcgtaagcgtcttgaaattcaatgttgcggatgatgacattgtcgacgccgttctttatattaaaacttcctcctgtcactttggcatttgaacccgagccgatgatcgtcgtatttgaaggaatgtcaaccacgacccgtgccttctggtttttttgcgatcgctgtctggcgtcttcctgggtgcctgacggcgcttttttcccccatttgtccgggtcgtacgcctttagataagcattgagatcatatgccggatctttataatcattaaagccgagtgttttattgcggtcgtccgtattcatattgattgtgccttgtatgtaaataatcttcggcgtgctgttggcgcttccccctaatgcggaaacgagctgctgtctgtttgatacggtgtatacattcgatgaagaggctttcgcgccgccggttgtcccgccggaagcggctccccagccgtcatttgttcctaacgtctgccgccccagatcagcggcatagacgtccgcagggatcatacataaacaaaccgccagcataaataacatttttttcatgaattgtgctcctcctgattctttgttccaatttattacaatcgaattgtatcaaatcagttgagaaacagcaccgaaaatgtacagaatgtgcctttcggttttattgcggaaaccgcaaaaaaatcccaagggaccgaaaaccccttgggatctgttcagcttacgcccatgatttcactttttcattatccgtgacaaacagaagaacttttccttcatctaagcgcttttcaaattgtgacgcttcctcttctgaaaagccgatttcgtgaattttgttgcggagctcgtcgccttttttattaaacatattgccgaccgcgtgtttaatgcccgtttctttcgctccgatggtattgacatcagtattatcggccaggcggtccgttctgtcgtcatcatgtgaaagcacatacacgtcctcttttgcaacacccagctgctgaagctcttttacgtcctgcatcagtttttgatcatttgtatattctcttactaccggtttcattgataagtcctcccttttgtttttgtatatttgatgtttacccgctcaatcaaggatcaaacaaaagaaagagagttccgtgaaaaaacgggcaggttgtcggtggatattttcttgcgggacatgttacagtagaggaagctacatttatcagaaaaataaaaatcttcatgagccgattaagcagggaggtggttcctattcattacttttcaccggaacagcgatttaacgcttgggttgtcagtgatttagtgaagcaggtattccgccggcatacccgctgcccggatggaataaaagagcttacggcctttgctgaagatacttttcatattaatatcgatttcgttttctctatcattatcaatatcggtgatatcgaatccgttctgccgaaagaaattgaaaataggctgggttcttatctgaccgcgcttcagcccgttgttaccgctgacatgcttcattcttcaaaaacgaatgcctatgaatatttggaacatgagaaaaacaccgatgtgtaccggttattctattaaatatgcatataaggaaagaagggccctgggcccttcttttttatggccgctgacggtttgattttgtaatcgggaaatggttcgtgttacatttggaacaaccacttatcttgaaggaggattcagtatgccgaataatcagcagcaaattcaattggcaagacgccccaaaggcgttcccgcccatgacgatttccgctttgaaacgattgccgttcccgaaccgaaagacggcgaagtgcttgtgaaaacgagttatgtgtccgttgatccgtacatgcgcggacggatgcaggatacaaaatcatatgtagagccgttcgctttagatgaagccataacaggcggagtgattgccgaggttctcacagacggcaataagctgaaaaaaggcgatattgtgatcgggaatctcgcatggcaggaatactcagcagtgaatgagtccgccctccgcaagttggatacggatatcgcacccgcccaggcgtatctcggcattttagggatgaccggactgaccgcttacttcgggctgctcgatatcggccgtccgaaaaaaggcgaaaccgtcgtcgtttcaggcgcggcgggcgccgtcggctcaacagtcggacagattgccaaaatcaaaggcgcacgggttgtcggcatcgccggatctgatgaaaaaatcgcgtatttgaaagaggagcttcaatttgatgaagccattaattacaaaacggcggatgatattcaaaaagcgctggaacaggcatgtcctgacggcgtcgatgtctattttgacaatgtcggcggaccgatttcagatgcggtgataaacctgctgaatgaattcgcccgcattccggtatgcggagcgatctcatcgtacaataccgaacgtgaagaagaagacatgggcccccgcgtccagccgaagctgatcaaaacaaaagcgctgatgcagggattcatcgtcagtgattatgctgaccgcttttccgaaggcgcgaaacaattggccgaatggctcaaagacgaaaagctccactatgaagaaacgattacggaaggattcaacaatattcctgacgcgttcctcggcctgtttaaaggagaaaacaaaggcaaacagatcatcaaagtcagtgatctaagttaacaagatgataaaaaaaaggagggctttgtcccctccttttctgctttttcgcatcagccgcgaagaatcaaagtaagaaagccgtcttcatcaggctccgtatcttccaaagcgaagcccgctgcttgaaagcaggctaaactgatttgattgtctttttcgatgcttgccgcccattcccgcacgctggtaaacccaggatcagtcagcagtttttgcaagatctgttttccgtacccttgaagctggtacaaaggattgacgatcaatccgatatacgcccgctcctccacaaactctatagagaccatgcctgtcggaagctgcccgtcatatgccataatgacagtatcgtcttcatctttactcaatcgtgcataccacgcatctaatggcagcatcgcatccattctccgtctgatgttatcgttcttaaaccagtgttcaaggattttcagctcacgcaccttcaatatttgaaatctgtctattaaacccatcttcccacttccccgcctgaaccttttccgttattttacaataaaaaagaagggcttcccgccctccgtttcttatttctcagataattttccgcctgaataaacggcctctttcagctcaattccgagtgatttggccatttttttcagtttggattcttccatcggcgtgacaaggctgagtacggttccttctttaccggcccgccccgtccggccggatctgtggatatatccgtcttcattcgggatgtccgcgtgaatgacgtacggaagatcgtcgatatcgagtccgcgcgccgcaatgtcagtcgccagaagcagcggaaattctccccgttcaaacgctgataatatctttgcccgctccatttttttcgcttctccgtgcaggatgccgaggtccacatgatgataggcaagtttttccgcatagacgcttaaatttccgatatctctgacgaacacgagcgcctgcatgccgttcagccgtgacagtttttgcaatagcttcactttatcccgctgatcgcagacgagatattgatgtgtgacgcgcgctttttccgccgtattccgctccactttcaaaacggccggttcgtgcgcgatggtattcagcacctgttctgtttccggctgcagcgtagcggaaaagcttaaaagctgtcggtctttcagcgtcgttttaatgatttttttcatcgtttcgcggtgttcctttgtcacgagctgatccgcttcatcaagaacgatcgtcttgacttcatgcattttcagctttttcgcctgaatcaattcgagcaccctgcccggtgtgccggcaatgatatgcggtttatttttgagcttctccacctgctttttcacgtttgccccgccgatcaaagacaaagcgcgaagatcggagccttttttccaatcctgaatcacttgaaaaatctgcatcacaagctcgcgggacggcgctaaaatgatcacttgcggatgtttctgttccgggttgatccgctccagaaccggaagcgtgtacgccaatgtttttcccgttcccgtcggggattcggcaatgacgtctttcccttccatgatcacctgagcggctttttcctgaatgacggtcggctcctgaaaacctgaggcctcccagttttcggcgataaatggttgtgtatgctgtaaaaatggccatgtttgggtcatgtcgttctcctcaattcttaaaatctactccatagtatctcaaatgcacgcgccaaacgcaattttctttttccttccaagccttttaacaaacggtctcctcctttataatcataaatgagaaagacacatgataaataaaacgtgtctgataacgatagaggtgtaatgatgagtattttatccgtaaaagatttaagccacggcttcggtgaccgtgcgctttttaacaatgtatcgttccgtcttttaaaaggggaacacgtcggcttaatcggagcaaacggcgaaggtaaatcaacgtttatgaatattattaccggaaaacttgagcctgatgagggtaaggttgaatgggcgaaaaacgtgcgtgtcggctacctcgatcagcataccgtgcttgaaaaaggaaaaacgatccgcgacgtgctgaaggatgcgttccattacttatttgcaatggaagaggaaatgaatgagatttacaacaaaatgggcgaagcggaccctgatgagcttgagcagctgcttgaagatgtcggtgtcattcaagacgccctgacaaacaatgatttctacgtgattgacagcaaagttgaagaaatcgcccgcggcctcggcctgcaggatgtcggacttgaccgcgacgtcacagatttaagcggcggacagcggacgaaagtgctgctcgccaaactgcttttggaaaaaccggaaatccttctgttggacgaaccgaccaactaccttgatgaacagcatattgaatggctaaaacgctatttgcaggaatatgaaaatgcgttcatcttaatttctcacgacattccgtttttaaacagcgtgatcaatttgatttatcatgtggaaaaccaggagctgacgcgttatgtcggcgactaccatcagtttatggaagtatacgaagtgaaaaaacagcagctcgaagccgcctataaaaaacagcagcaggaagtggctgagctgaaagatttcgtcgcccgcaacaaagcgcgggtcagcacgagaaatatggcgatgtcccgccagaaaaagcttgataagatggatatgatcgaactggcggccgaaaaaccgaaaccggaattccatttcaagcctgcgagaacgtcaggcaagctcatttttgaaacgaaggacttagtcatcggctacgatactccgctgtcacgcccgctcaatctcagaatggagcgcgggcagaaagtcgccctgtacggcgcaaacggcatcgggaaaacgacgctgttaaaaagcctgctcggtgaaatccagccgctggaaggcacggtggaacggggcgagcatcaatacacgggctatttcgagcaggaagtgaaagaaaccaataacaatacgtgcatcgaagaagtgtggagcgaatttccttcctttacccagtacgaaatccgcgccgccctcgccaaatgcggcctgacgaccaaacacattgaaagccgcgtctccgttctcagcggaggagaaaaagcgaaggtcagattgtgcaagctgatcaattcagaaacaaacctgctcgtgcttgacgaaccgacaaaccacctggatgtcgatgcgaaagaagagctgaaacgcgcgctgaaagaatacaaaggctccattctgctgatttcccacgaacccgagttctacatggatatcgcaacggaaacatggaattgtgaatcttggacgacgaaagtgctgtaaacacaaaaaggaactcccgcccatgcggaagttcctttttttcttaatgtccggcttttattccggcgagatgtttgcgtcccatgagaaggacaagcatgccgacaaaaacgacgatcccgcctactgtatatggagtgcttgcggtgaagtgttctgacagcattcccgcaatccacggagcgagcgcaccgccgataaaacggactgagctgtaggctgaagacgcgattgaacgttcaaccggcgcagaacccatcacagcggttgtcatgatcgtattcaccataccgagaacagcaccggcgacaacgatacacgtaatgatcaacgtctgatggtcagtccagatccccatgacgatgagaatgaccgcaaaggcgataaagagaacgacgagcgaacgcactgttcccagcgctttgtgcaagagcggcgccgtaaagactgacgtaattgccagcaataacccccagccgaagaagacgtatccaaggccgtgttcatctaaatccagcacgaacggagaataagcaagcaaaataaaaaatccaaagttgtataagaatgcagatactgccattgtcaaaaggcctttatatttgagcgccttcatcgcatcaaacacaccgacgcgtttcgccggtttcggcagcttcggcagcatgagtgaaatcgcgcaaagcgctatgaacatgaggacagatactccgaagaacggagcgcgccatgagatgctgccaagctctccgccggcaagcggccccacggaaatccccaagccgagcgcggcctcatacagaataatggctttggcgctgccgccgacagataccccgacaatgacggcaagcgcggttgaaataaagagagcattcccaagcccccagccgccgcgatagccgacaagctgagcgattgaacttgagcttccgccaagggcggcaaacacgatgataaaaataagtccgagaagcagcgtccattttgcaccgatccggcttgaaatcgcgccggagaaaaacatcataaaaccggtaacgagcaaataacttgtaaatagcagagatacttcactaggtgaagcatgtaattgtgcggcgatcgccggaagaatcggatcgacaagaccgattcccataaaggaaatcacacaggcaaacgcaaccgcccaaacggctttcggctggctgaataagcctgttttctgttgtgatgatgtatccatttgaccagacctcctatttgatccattaaaagaaacgctatatccatagcgtttacagcaaaatcattcgattgattgaatggcgcgttcagctttttctttcattccgttaaggcgcgttttaaaatgctgaaatgtgctgatcttctcatcaatcatctcaagctggtggttcaaagcgtgctgaatctcttccagcttttctttccgttccttcggatccagtgacaacaagtacccctctttgtttaattccagctgacggctcatctccataaactgctgaagctcctgaagggaaaaaccgagcacttcttttgtgctggttactttttcgagctcctccatatcatcttcagagtaaagccggacgccgccttctgtccgtttaggagcaggaatcaaaccaatctcctcgtaaaaacgaatggttcgttttgtcaatccgcttcgcttggcaacttgatcaatcttcatccattccaaggtgaatccccctcttgtcgtatctgtttctattatacaccatttgaaccttaacgtaaacgtaaactttttatgcctgataaacttggtttggacaaaacgtttgtctttaaagcgccgggaaacatctgtgttagataaaaaaaaccggtatgacccgccatcttctcgggggccgtaccggcttttcttaattctcaagttcttcaatcatcagtgacaattcggtccagcgctccatcgccgcttcaagctcttcagccgtttttgcctgttcggccatcagttcttgaatctttccgaaatcacttcccgcttcagcgatttccgcttccagacgctgatgcttttcttcaaggccggcgattttgtcttcgatgccgtcccattcgatctgatccttatatgaaagctttttgcgctttttcttcggctcttcttccgcctttttctcttcggccggctgttttaccgccgtcttcttcgcttttgcgtgttccatgtattcactgtacgaaccttggaaacgggaaatgacaccttgtccttcaaatacgatcaggcggtcaatgacgcggtcaaggaaatagcggtcatgggatacggtgatgacgacgcctgggaactgttcgatataatcttcgagcacgcttaatgtttccgtgtccagatcattggtcggctcatctaaaaacagcacattcggttcctgcatcagtacattcagcaagtacagacggcgcttttccccgcccgacagctttctgatatacgtctgctgcatcggacgcgggaacagaaaacgctcaagcatttgttccgcggtgatgacatcgccttccgccgttttgacgatttcagccgtctcttttatatattcaatgactttcatatcgccgttcatttcgctgtggtcctgggtgtagtagccgatccggaccgtctgcccgatggtgatattgccgctgtcaggctgaattctgccggcgaggctgtttaaaagtgtcgtttttccgattccgttcggcccgatgatgccgattcgttcccccgggatgacaagctcattaaaccggctgatcagcgcttggccgttataggtaatggtgacgttatcggcttcgatcacctgttttccgagacggtgtgagccgatcgcgaaatcgagtgatccggagactgccggccctttttgctccttgagcgcctccgctctgtccactctcgctttttgtttcgtcgagcgcgctttcgcccctcttctgagccacgccaattcgcggcgcaggaggttttgacgttttgtttctttctgctccgccagcgcttcccgttcggcccgtttttccaagaatacttcatagtttcctttatacgtataaaggctgcctctctcaagctcgtaaattctgttcgtcaccctgttcagaaaatatctgtcgtgcgtgacaagcataacggcgcccggatattgcgataagtagccttccagccattcaatcgtttcattgtccaagtggtttgtcggttcatccaaaatgagcaggtcagccggctggatgacgtttttcgcaatcgcgacgcgctttctctggccgccggacagctcgctgacatccttcatcagatcggtgacgccaagtttggttaaaaccgttttggctaacgtattcgcctcccacgcatcattcacgtccattcgggcctgcgcatcaagcagctgtttctggcgctggtcattttccggttcttcattcagcgcctgaagcgctttttcgtattctctcatcgttctcatgacggctgatccgccggaataaatatgctcaagtacggtttgtccggccggaagctcagggtcctgatgcaaaaactcaatatgcacgcttcctgaagccgtaatctcgccttcctccgttgattcaaggccggcaatggttttcagaagcgtagacttccccgttccgttcgggccgattaaaccgattctttcattctcttcaatatgaaaggagatatggtcgaataatgtcttatctccgtatgttttataaaggttttccgcttttatgatgctcatggtccctatcaatcctcacgtaagttcatgtgttcattttaaatcaggcgctggaataaaactagtaaaaggacagacaaatttcttggaagagatcattttgtccgaagaatgtttccgcctctccttttatacactggaggtgaagaggtgatgacatgatcagcgtcagtttgtgcgttatcgtgaaaaatgaagaggaagtgcttgcgggctgtcttgattccgtcaaagacattgcggatgagattgtgattgctgatacgggctcgaccgaccggacgaaagaaatcgcggcccgttatacggataagatttatgattttgaatggatcgatcactttgcggccgcccgtaattttgtgttttcgaaagcggaaatggattatattctgtggctggacgccgacgatatactgacggaaaaggaccgtgaaaagctgattgaactgaaggcgtcgctttcaaaagaggtggacgcggtatccatgtattatcacgtcggctttgatgctcggggagaggtcagcttcagataccgccgcaaccgactcgtcaagcgtgaaaaagggttccgctggatcggagccgtgcatgagtatcttgaagtatacggaaacatcatagaaaccgatattgccgtcacacaccggaaatccgagaaaaagcactcgcctccctcagaccgcaacttgaagatttatgagaaaatggcggaaaacagtgaaacgatgacaccgcgcgatttgttttacttcgcgaatgaattaaaggatcacggccagtatcagcgcgccatcacgtattatcaccattttctttccacaaaacagtgctggatcgaagacgagatcagaacgtgccaatatctatccgattgctacagggcggtcggccatgaagaggccgccatgacgtctctcttaaaatcatttctgatcgattgtccgcggccggagttctgctgcaggctcggcgactattttgcggagaaacggcaataccggcagggcgtgttttggtatgagctcgccttatccgccaaaagcagtgatgcaggctttacccagctcgaatattccacctggtatccccatctgcagctctgcgtctgccactggcagctcggcgacagagaaaaagcgaagattcataacgacaaagccgcctcctatcatccgtcacacccgagtgtcctgtataatcaaaacgtgctcggcacataacatcaaaaaaaagagctgcccccgtatgtagggcagctccttattgattacgctgtcggaattcctccgcttacactgtaaatttgggatgtcacatagctcgattcttctgaggccaaaaagacataaatccctgcaagctccgccggctgtccggcacgctttaatgggacggccggtgtttccttgccgaatttcggaatgttttcaccgggctgtcctcccgaaatctgcagcggcgtccagatcggccccggcgctaccgagttgactctgattcctttattcgccagctgctttcctaagccgacggtaaaaccgataatggcatgtttcgtcgcggcataatccaacagcatcgggcttggattatacccttctacggacgttgtcgtgataatagacgcgccttccggcagatacggaagcgcggctttgacgagccaatacagcgagaatacgttgacttcaaatgtttgatagatttgttctgtggcaagattgctgatgtcatccactgcctgctgtttgccggcgacaagagcgagcgtgtcaagaccgccaagctcttgatacgctttttccgccaattctccgcaaaacgcttcatcgcttaaatctcccggcagcagaacggcttttcttccctctttttcaattaacgctttcacttcttcggcatccggctgttcctcaggcagatagttaatcgccacatccgccccttcccgggcataagcaatcgcggcggcccggccgatacctgaatcgccgccggtgacgagggcttttcttcccttcagcttgccggctcctttatagcttgtttcaccgcagtccggcacaggcttcatctctttttgcaaaccgggcggttcttgatattgttttggaaattcatcatgatcatatttcgtcagcgggttgtgcagatttgcatcagacatacaagactctcctttatcattggtgatgtattcgtatgtgtacccctgagcatgacggatcaaacgtgtaagtgcagtttccgattgataaagggaaaacaaaaaaggagcccgtaagctccctttttttatgattctccgagtacgttttcagccattttcgctaaatgctgggcgcttcccgaaatttcctgcatcgttgcagaaatttgttcaaccgccgccgcttggccgtttgtgttctggttgatggattcaatagagtcctccagccctttcagcaggctgtggatttttttcgtaatctggtcaatttggccgacgttgtcttttgaatgagtggcaagcttgcggatctcatccgccaccacggaaaagcccttgccggattctcctgctctcgcggcttcaatggccgcattcaaaccgagcagattgctttgatccgagatgcccttgacagtgacggaaatgtcggcgatttctcccgcgctttcactgacttgtttcgcctgagtggaaatcccggtcatctgtgctgagaaaccgctgatggattctgagatatccgcgatggccgaagcggtctgttccacgacggcggacaggctttcagcgacatcgtgaagcttggctgatttttcaaggctggtgccgagaccgacgccgccgatgacttttccgttttcatcgtgaagcggaatcgctctggcgatcagcggaaatccgaacagctctttcggcaccatgcttgtcttcttctgattcatgcggatcgcgtctgtaatgatgtcccctttttgcagcgggtctcccggctttacattaagagaaaacgttttagccggaatattcacgattaatttttctgtatcataaattccgatggtgatgtcatcttggatcaggctgtttaaaaaaggcgcaactttgacaaaagcgtcaagcaggctgtgcgtttgctgctccgtctgtatactcatttctttcactccttcttaatatgggaattgccgtttttcatgctgaaccgaaatccatttcagcgtggtgaattcttcaaggctccattcgccgttcagcctgccgagacctgattgtttctcgccgccgaacgcgacgttcggttcatcattaatggtcgtatcgttgacgtgaatcatgccggtttcgatccgcttagcaaactcaacgccgcgctcaacgtttgccgtatgcacggctccgcttaaaccgaacggtgtcgcgtttgcgatgcttaccgcttcatcctccgtttcaaacggcatgatgcagacggccggtccgaacagctcctccttcgcgatgctcatctcaggtttcacatcttttaaaatgacgggctcagcgaccgttccgctgaatcggccggacagcaccggaaccgctccctcttctatcgcttttacgacagaccgtctcagaccttccgcctgcctctcattgattaaaggaccgataaccgtatcagggtccatcggatcgccgactttcagcgatgacactttcgcttcgtaaagctctgtaaatttgtcatatacagatgtgtgaacgagcacgcggttcgccgacatacagatctggccttgatgcgtaaaccggctgaatacggccgcattgacggcgtattcaagatcagcatcctcaagcacgatcagcgcgctgtttccgccaagctccaacagcggttttttaaagtgtttgactgcaagctgtccgatatagctgcccactccggttgagcctgtaaatgagataatccgcggcacgggatgctcaacaaagctgtcgccgatctccccgatatctgtcacgataacattgagcagcccgtccggtacgccggccgcttcaaaaattttcgcgataagcgttccgccgcagatcggtgtttcttcatgaggcttcagcacgacgccgttccccgcgccgagtgccggcgcaacagatttcatcgaaaggaaaaacgggaaattaaacgggctgatcacccccacgactccggcgggtattctgtacagtctgttttcttttccgtcaatcgtggacgggagaattttcccttccatccgcaccggaaatgttgcggcttcttttatcatatttttgacaagtccgatttcaaactcagccttcagccgtgttccgccaagctcctccatgattaagtaaataatcgcttcttcgtgctcttcaatgaaagaaacggcgttttccaaaatggcccgctttttaaaagggtttactttgtcccattcttgtttcgcaagagccgcggcgcgatatgccgcatccacatcatcagacgtcgctttttggaatgaggtgatgactttttgagtataaggatttctgttttccaatacgttccggctgcttccatccctccatcggccgccgataaactgcttatttagttcttcatattgaaacatgtaaacatctccctttcaccgaaacttgaaattagttgatgagtcatcttttgtatcggtcttaaggtgagaaaattgaactatttcacaataaaattcccgttccttccgcgcatcgacgctttttagctttgtccttttaaagtggaaaattctttaattgactgcgagaaatttcgacaatataatacaaacgtcagtgtatataatgataagaatattatgaattttcaggaggacccatatgtctttactatttcggaaaaagccgctggccgacttaaaggcccagagcaaacagaccagcctgtcccgctcgttaagcgcttttgacttggttttgctcggaatcggctgtgttgtcggcacggggatttttgtgattaccgggactgtggccgcgacaggcgcaggaccggctttgattctgtcgtttgtgctcgcgggccttgcctgcgcgctcgccgcgttttgttatgcggaattttcttcatccattccgatttcaggcagcgtatatacgtattcatatgtcactctcggggagtgtctcgcgtttttaatcggatgggacttaatgcttgaatatgtcatcgcgctcgccgccgtcgcaaccggctggtcatcctatttccagtcgcttcttgcaggcttcgggctgcatcttccggaggcgctgaccgccgcacccggcagcaaaacgggtgccgtgttcaacctgccggccgttatcattattttggtcattaccgcgattgtttcaaggggcgtgaaagaaagcacccgctttaacaatgtcattgtattgatgaaaattgcgatcattctgctgtttatcatcgtcggtttcggctacgtgaaaccggaaaactggtcgccgtttatgccgttcggaatgaaaggcgtcatcacgagcgccgcgaccgttttcttcgcgtatctcggatttgatgccgtgtcaaacgcgtcggaagaagtgaaaaacccgcagaaatcaatgccggtcggaatcatcggcgcgctcgccatctgcaccatcctttacattacggtatcgctcgtcctgacgggaatgctttcgtacaccaagctgaatgtcggagatccggtatctttcgcactccaatttgtcggccagaacaagatagcaggcattatttccgtcggcgcgattatcgggattacaacggtgatgctcgctctgctttacgctcaggtgcgccttacatttgcgatgagcagagacggccttttgccacgcatgttttccaaggttcacccgcgttttaaaacaccgtttcaaaacacatgggtgacggggatcgctgctgccgggatcgcgggttttattgatctgggaaccttggcgcatctcgtcaatatgggaaccttggcggcctttacggtcattgcgatcgccgtcatcgttttaagaaagaaacatccggagatcaaatcttccttccgtgttcctttcgtgccttttgtgccgatcatcagcgcatgcttatgcctgtatctcgcaagcagcctgccgggcgtgacatggctcgcctttgtcatctggatcgccgccgggatcgtcgtttatatgatgtattcgagaaaacacagtttgttaaataaataaaaagggaggctcttttttctgtttgagaaagaagagccttttttgcacttgataattcattcaccttatgaataatatggtgtatgcttcgtttacataaaaaggaggagaatcactttggcaattgccgccccgcttaaagaaaaacctgtccatcgtcccgagacaaccatgtattctattttgttcattatcgggatctgtcatctgctgaacgattcactgcaagcggtgattccggcgatgtttccgattttggaacgttccatgaatcttacatttacgcagctcggaatgatcgcctttacgctgaatatggtgtcttccgtgatgcagcccgtcatcggctggtatacagataaacgcccgatgccgtatgctttgccgctcggactcaccgcaagcatgctcggcattttaggtctcgcgttcgccccgtcttttctgacgattttatgctgtgtcttttttatcggccttggctccgccgtctttcatcctgaaggatcgcgtgtcgcctacatggccgctggcgaaaagcgcggcttggcgcaatcgatttaccaagtcggagggaataccggccaggcgatggcacccttgattaccgcgctgattctcgttccgctcggtcaattcggctctgtctggtttacgcttgtcgccgcagtcgctgtgctgtttctcatttatatcgccaaatggtataaaggccgcctgattcatttgcgcgccgtaagtaaaaaatcaccggcctccgctgtgcagaccgtgattacaaaaccgattattctcgcccttatcatgattatcttcttaattttcgcgcgctcctggtatgtgagcgcgatcggcaacttttatacgttctatgcgatgaatgcctatcatgtcagcattcagcaggcacagagctacatcttcgtctttttatttttcggagctgtcggaacgtttctcggcgggccgcttgcagatcgtttcggaaagcggaacgtcatcatcgtttcgatgatagcatcggctccattgacgatttttcttccgtttgcggggcctgtcatcgcctatggcgtactggcgctgatcggtgttgttctgatgtccagcttctccgtgacggttgtctacgcgcaggagcttgttcccggcaaaatcggaacaatgtcagggcttacggtcgggctcgccttcggaatgggcgcgatcggagccgttgcgctcggagctcttattgattcagcaggattgacgccgaccatgacagccgtcgcctttctgcccgttttaggtctgctcgcctttgtcctgccgagcgacaaaacattaaaagaatggcattcataaaaataatccctgccttttcggcagggattttatgtttcaaccgtataaaaatgagtgtcaggaaccgcatatttcggaataaacccgtctctgaaatcaggaaacgctttttgaatttcatcaatccatttttttacgtttttgatgtacggcacgtaaatcatattgactgtcgcctcgtcatcaatgtgatagtaccagcacagattgaattcgttctccgtgacgagcgtaaagcctgaaaaatgataaaacatcagcggggtgtcattgacatatacagccccgtcgcgcaggctgacgtcatattgctcaatattccacagcgccgcattcgcgccgatcgactccgtgacatgaacgtcttcaaactgcgcgggccacttttcaacatacctttggtcaccgtatgtctttttttcttcattcatctccaccgtacaataggagatgcaatcctgtctccactgccagaccgcccgatacgcttccccggtattccgcgcgccgacaaacccggtgttgtactgccccgtcagcttgtaataagacgcaaaccgttctgaattgcggtgatccgtcagaaaaagggaagcatccggcttttccgcaaacagctcgcccgcatctgagaagaaaaagagatcggtgtccaagtgggcaaaatattcggcttcatcatactctgtcatcacatggaacagaaatgccggcttcagcgtccagcaatattcatgaaacgtccggccgccctttgcttcaagcagctccgggtcctccatttcatggagctgaaccgccgtgacatgttcccacggcacctgctgaagcagttcgtacgctttctgatcgacacacagcacatacagatgaaaatcccggcaatgctcatggagagaatgaatcatcggcatcagtttaaagatatgcgttctggaaacaatggttgaaaaatgatatttactcaccatatcacatccaatttatttaagatccacatgcagtaaatcagcagccagcgctttgaacgcccttgcaaagtgcgtgacgcccagctttttttccgcttttgccaaaagctttccgacctccggcagattgaagctgttcgccgtgatacgcgggcttttcgtcttccagtccgggtcgaggttgcggtctttaaccgcgtgcagcagctcgagaaaaatgtgcagcaggctttcatatttctcataatcaagcagcacttcgatgtctgccatcatgctgttggttaactccgcgtcaaacgggccgttaaacgcgaggtgcacgtcaagcgaatgaatgtcattgtacttgtcgcacatgtacgcgatattcgccctgatgtcatcaacggaagcgcagttgctcggatgctcctgatggacgctcatgatatcgcgccgcagctgaaatctcattcccgactgatgaagcctgatgccgagatcataatcttcaaaaccgtatctgacgatgccctcatcaaacaggccgagatctgccacgtgctttctcttgactgacgaattgttcgtaatgaaaaaacgccacggcagacggtagccgttcaaatcatctccgtatttttccaaaatgcttttcagcacacggataaagtcggtatctaaatcaaagcattggtcaagaaaacttccgtctctgatgtcactttcatcaaggagcggctctttatcgcccggcagctcttcatacagttcggcgagtttttccttatgctctttttcaaaacggtcataataaaagctgtaaatccgcttccagaacataccgcatacgacaagatcgtcccggttctcatgagccttgatatgcttcgccaccaaatctttttcagcaagcatatcgctgtcatggaagatcaaaatatcgcctctggcattgcggaccgcctgattccggccgtaagcgattcctctgttttctttaattctcacaaaaatcagcggaaaattcgcgctgaatgattccagcatggataaggttccgtcttccgaaccgttgtcagccacaatcacttcgaacggctctgtgcattcctgttcattcagggacagcaggctgttataaagcctctccttggaattatatgcgggaacaatgacgcttgccttcacttttcgttcacttcctgtatatgatcatttatttgttatcatcctcagatgcaaagccgctgaactccgggcagacggcgctgaccgtcccgatcacccgcttcagaatgtcctgataaagctgatggacaaacggcagatcggtccggtccgtctcatgaatctgccgaatgtcgccggctgtaatgatccggtatccgctgaaatgatagaaaatcagcggacttccgtcttcaagcacaagacgtccgtccttccatgaaaatgtgtggcggccgtaattccaatgtccgatattcacgccgggcgtggtgatgtcacacacattcgggaacaggccggacatgtaatccaagtagccttgatctccgaattttccttcgcccggcgcatttttgcattcttcaaggcagcgttctttccaccatctgagacaatctgtgccggcactgtcggttttgaagctgagaaaaccggaattataccggcctaaaagacgctgcagcatgtcgatttcctgtttttcaaatgagggaatgacgatatcaccccgtgacagaagcaccgaacaatccggctgattgtcaaaaatcgcgcgcggatcagcgaagaaaaacaaatcggcatcaatgtaagtgacacgctctaataccggatgtccgtccagcacgaattcgagaaataccggcttcaccgtccagcagtattcgctttgatccctcgtccgcttcagttcaaggagctcctcattttccagtgcggacacctgaatcaaggtgacattatccggccgcattgcctgaagcacgtcataggtgtcttgatccatacacaaagtaaaaatgggggcgtccgcctgaaccgctttcaatgagccgaacaaagcgatagcctgatacagccttccttttgataaaactgtgcaatatgcgcttgtcacgtctttctctcacctctgtttctgttacttttgaaaaaaggctttataccattcgatcgttttttccaatccttcatcaatggtatgcgcgggtgtccaattcagaagcttcctcgccttttccgccgataaatattggtgcttgatttcatggcttccctggttgagcactttcggcttaaggtcactgtccatggccttaagaattttttctacaagctccagcaccgtcagctgaatctcattgctgaagttgaacgcttcccccgcaagattgagctcctccatcttttccgccagcaaaaggtatgcctcgaccgcatcctcgatgtaaaaataatcacggataaatgtgccgtcgctgcggatttccggcgcttcaccgttcagcacgagctgaatcgtctgcggaataatccgattgaagttcaaatctccgccgccgtacaagttgccgcagcgcgtaatacagaccggaagtccgtacgtattaaaatatgtgtggcttaacaaatcggcacagctttttgatacgtcatacggatgtttgccctgaagaggcatgttttcatcgtacggcagtgccggctggtcgccgtacgctttatcactggacgcgacgatcacccgcttgatgagcggatgcctgcggcacgcttcaaggatgttccatgtgccgagaatattggcttcaaatgtggaaatcggattgcggtttgcgacgccgacgatcgcctgagcggctaaatgaaagaccgtgtcaatttcatattcgcccagcgcccgctcaatcacatccagatcctcaagcgcgccctgcacgatattcatttgcttcacttgttctccctgatacaggttcgacttgggcacagtgtcacggacaagtcccgtcacattggccccctgatcgatcagttccttcaccaagcagcttcctaaaagacctgtacatcccgtcacaaacacatttttatttttccagaaactcaaacttgatcaccataccttccatacatgttgtccccggtcccacatgttgttgatttccagcagatttttatacgtatcgatcgccgtccagaaaccgtaatgccggtataccgccaattcgccgtctttcgccagctccttcagcggttcttcttcaaacatgacgtctctgtctttcggcagataatcaaataccttcgggctgagcacgaaaaatccgccgttgatgatgccgtcacttgaggttttttcagaaaagcttttcgccataccgtcttcaaccgtcagcgttccgaattgcgaggtcttttctataccggtgacggttgccgcagccccttttgattgatgatagctgatcagatgaaacaggttgatgttcgccagtccgtccccgtacgtcataagaaaggtttcatcaccgatgatgtccttcgcctgtaaaagccgccccgctgtctgcgtgtgttcccccgtgtctaaaaaagtgattttccacggctcggattttcccaatatccgcacttctccggtagagctgtccagcgtcatgctgtgattcttccagtcataatctaagaaatattccttaatcatctctcctttgaaaccaagaagcaggataaattcgttcacgccatagtattgatagagtttcataatatgccatagaatcggtttgccgcctatcatggcgagcggtttgggacgttcattggtgatttcgctcattctcgttccttttccgccgcagagaatgactgctttcatctctacccctcttctctgtgaatattggattcgaaaccgcccgtataagagaaaccaacccgataatttgtccgattctctatcaccggtttcaaaatctactgtaagatatgagagattggcgccctttgtgaccaaaagctctctcttttttcagattggtgaagatacacacaaaaaagagcctcacggaaattccgtaaggctctttctattatttattatcctgattcagcttttctttgccgtaatgatatttagacggatcaaccggcgtaaagtcgctcaatttgtggaatctgagcaagtctttgtacatcacgctgtcagacagcttcagctgctctgtgactctggctttcaggtttttcgtttcctgattgcctttcagttcttttcctgtcttcgtatcgtatacgacattggagatggaagtatatttcggcgtgacgtaatctccgttacggaacgtcaccgtatcatcatggtctttcgagaagagatcggtgccgaaattaatatatttcttagaatcgatgccttccaagtgaaggatcgtcggcacaacgtccatttcaccgccgtacgtatggttcaccccgccttttttgccggggatgcgaagcataagcggcacacgctgattctgtgcgttttgataaggcgtaatttctttgccgagaatttctttcatcgcgcggttatggttttcagagattccgtagtggtctccgtaaagcataatcaccgagttgtcatataaaccggatgccttcagatctttaaagaactgttcaagcgcttcgtcgagataacgcgccgtctggaaatagtcatccacagtcgcgtcgcccgttttcgctttttcgatcgttgcgtctttttcatcaagcgtaaacggataatggttcgtcagcgtgagcaaatgcgcgtagaacggctgtttcagcgattgaagcttcggtacggattctttgaagaatggtttatccttcagacccatattgacaaggttgtcatcagacatatcgtatgtgctggcgtcaaagaatttatcgtagccgatatgtttgtaaatctggtcacggttccagaatgatttgtagtcaccgtgtaaaacggcgcttgtatagccctcactttggtcaaggatggcaggaagcgattgatacgtgttttccccttttgtcacgaaggctgacccttcaggcagtccgaacaggctgttatccatcatcagctcggcgtcagatgttttaccttggcccgtttggtggaaaaagttatcaaagtacgtcatgtcctctccgccgcgtgcgagtttattcaggaacggcgtgacttcttttccgtcaagtttgtagttgatcaaaaacgattggaaactttccaagtgaatcttaataatgtttttgcctttggccttgccgaaatactcggcgttcggcttcgcgtaatgcgacgatgtgtagttttcaacgctcgtcaggtcatcgctgctggcatatgcccgctgtgattccgtctgcgccgtctgtacgccgtcataaatcgtgtaattataaaggcctaagtattttacaatgtaattgcggtcaaacgttcttgtcagcagctccgggcggtcctcttcggcaatcgccaggttcacgaagaacaaaacaatacccgtcacgataattaatgacgtataccgttttttcagcttgaattccttcagctcacgtctccacaccagaagcgcgattaaaataataatatcaacaaagtataaaatatcatggccggacataatgctgaagatgccgtctcccatatttccgacattaccggattgctttaagttagggaatgtcaagaaatcatcgaagaatcgatagaataggatatttgcatacaaaataaacgtcatgatgaaatcaataatcaccatgataatcgctgatttgcggcctttcgcaaacaatgccagtcctaaaaagaaaatggcgcttgagaacggattgatcacaagcagaaactgctgcgtcggacccttcaccccaaggttgaattcagcatgataggctaaatacgttttggcccaaaacaaaataatagccagtacaaaaaaactaagtctgtaagaaaataatttcttcatggcaacctctactttcctaaacactttaaatctgtattcttactttttgcttcaattcctgctttccgagcaaaacgaaagcatcacacagccccataaacacaccatttaaaaaaacgatatatttatcattcgtgtcatgcccattgaacatcttatcccgccagccattagacgcaggatatccgttcttcgtttcacatttttttctggcattaaaaggtaccgtatcagacccggtctgaaaataggagataccaaatataagaataacacaaacttctaaaaacgaaaaatgaatatcaaagacagccgcccaacaggcgggctgaagttattgtatgcaaaggggctgaaaaacttgaaggtttttttggctgatgtaaaaaaaggactggagtcatccagtccttttcatcaaatcggtcaaatccccgcccaaacatcttttgcgtaaatgccttttgtctggaggtccaaaagccattcttgcgcttgccgttcgtctgtttcgtggaccgactgatacgctttttgcagcgttgcctctacatcgggcgccattttgctgccgtcgccgcaaacgtagaggtgccctccccggctgaggatggaaattaaagcgccggcgtctttcgccattaagtgctgcacatacgttttcggtacgccttctttgcgggagaaagccgtatgaagcgtcacgattccgtctttttcataagcttcaagctcgtcacggtaaataaaatcatgatcgtttctgcatccgaaatacagatgagcctcccccagctcttttccttctttttttaacgccgcgcgggcctgcagaaatccgcggaacggggcgactcctgtgccgggaccgaccataataatcggtttttccggatcttccggcagccggaatcgtgtttccggagtgcggacaaacatcacgataccatcctcagggccgcggtccgctaaataattcgaagcgactccgcgatactcacccaaaccgctccgggcggggccgcgaacgacgccgacggtaattgaagcctgaccgggatttttccgaggcgaacttgaaatcgaataataccgcggcttcagcggacgcaaaagctccagaaatcgctcaaacggaagttcacacgcttcatatttttcaaggagatcgagcatcgagacgcgcaatgttaagatttgctcctgatagacgccctcctcaagaaaatcttccaattcccgtttgtgcggcggacagaccgtataagcggccatttcccggatttgagctcttgatgccgcttcctgcaattcgacacagctgctcagaagatcatgcagcctgaccggccgatcaagcgggagatgagccgcgctctgcccgctggccgtcagcagcacttgatcattcccgttcagattgaaccggcggagaacacggctgacctgctctttgctgtttaccggcagcacgccgagatgatccccctcatgataggcagcctctttcggcagagtgatttcgatatgccttgtgctccggccgctttccggcgcctgaagttccctgttttccgcaacggatgcgtaaaccgcttcatacgtctgtgccaaaggagacccgccaagcccgctgacaaattgaaggcccagcgcacttcgctctttttcggcattttcattcagcttgagaccgaatgccttcatggcgtccgtccacatgctttttttccattcatcaagctttccttcaaaatcgccgctgacgtccccttcgcctcgggaggaaaatcgttccgcccctttttcggcaagcttctcatcaataagcctcggcacagcctgatatgtcgccgcccagttatgatcaccgcagccgaagacggcatatcggacgccttccagttccccgggtttgacttcttcaagccattgaacgaattgtcccgcgttgctcggaggctttccgttataagaggacgtaatgatcaagagagctccttctttcggcagttttccgatccggtcatttaaaggcgccgtttcagtccggacgccatgcatcccggcagtatcggcaagctcccgcgccacgccttctgcggtttccgtatctgagccgtacagaatcagaagcggtcggttatcaagcccgataatggatgcgccttttgtttcccgtttttctttttcgacgtcttccgccgctttttcagccgccgggagagcagccgcaacggcttctttgtttctcggccgcacccggatatgaaagtcgccgggcttgatcgttagtgtctgtttaatatcgagctcataatcggtgtgatcgataaaggtaaaatgctgcagaatcatccccagaacaagggttgcttcatgcagggcgaactgcataccgatacacgccctctgaccgtttccaaacggcttatacgcatggtgaggcacttgatcaggatgttcaaaccgctccggataaaattcctccgcattgtctccccatgcgtctttatcacggtgaagctggggaattaaaacggaaattctgtctttcggcgtgatcggatatttcccgccgatcaccgtatcctctttcgcataaaggctgaacgcaggcgcggtcggccataagcgcaatgactcctgcaaaatcattcggatataactaagctccagcacttgtttataagaaggaacgggatcggtcaaaacccgatcggcttcttcataggctttttccaaaacacggggatgtttcagcagaaagtagatggcaaaggaaagcaggccgctggtcgtttcgtggccggcaattaaaaacgtgatgatttgaaaccggatattttcatcatcaagtttttcgcccgtttccgggtcttccacattcagcattctggccagcagatccttttcatcccggccgcctgaccggcgctctgcgataatactgtcaactaacgaaaacatcgcctgaatgtcatgatgaaattggcgcttcgtcctgatcataagcttatcctgaacatcaaggcgctgcatttggtgcatcgcttcatcaagggcgcgcaccatgctgttgataaacggatgaggcgtttccctgtaataactgttaaaccgatagttaaagccgcaaagcccgatcgtatcgagcgtcaggcgggtcatatcagcaggcacatcaacggcctcatccgggttcagcctagcccatttttgaatcagctgcaccgcgatatcagtcatcatcgaatgataatctttcatcgcgcgctggctgaaggtcggcatcagaatattatgcgcctttcgccagttaggctcatgcgtccagcttgtaaacagcccgtcaccggaaaacgcccggactttctccaaagccccttcaatgcttttatcgaaccgctcttcatcacaaacctctttcaccagttcatggccggacacgacgataatggcgcccgccggcgtatgcagctgaaaaataggcccctgctcgtttgccagtttgataagcgacattgtaggcttgtctttatcaagcaaaggaagattgccgagcgggccgaatgtcttcggctgcggaatcggacctgtttccttcatgaataacaccctttctaacacgttgatgcgttccttccaactacattgcccttttcaccggccgattatccgccgtcacggatcaatcatcggattgacgatcgataacggttttttctatactggagaggcttgttaaatacagaaataaggtgagttcacatatggattttgaaatcaagtttttatcgttttacgtcattcaagtggaaggaaaagacgaacaggcaaacaaacagttcaaacatttccagacccttgacacggaagaatttgaagaaagcgagctgaaggattttcttgacggggaattgaagaaaatcgtcaaacggaaagccgaacggcatccgcaatccgagcaggtccccacaaaaatcggccattttatcacggagccgagccatgagcttgattcaaatccgaattacaaccttttcaaccgcgccagacttgcggatacgaaggaagcatttatcgaggcaagcgagcagttcgtccgcacttaccttgatacaagcgccgtgcgcggcggtgtctttatcgtggcatcggccgttccgcgcaagtattttgaagacaaattcgtctttatgatgaaatgcgatttcgagccgaaggtcgcccgcatctcagacgcctcttctctcattaaaaaggtcgaaatggccatcacgacaaaaaacatgaaaagcattcaatatccgtatatgccggaagaaggcatgacggaagagcatgagctgaaaatccaccaggcctcgcacgcccgttatttcgaggattttctcaaatttgtcgaatacggcgaatcgatgccggaaatcatgaaaagccaagtcatgaacatggtgcaggaacacgtgtatgaaacgtttgaagaaaacagcgaagagcttcagcagtttgagcacgacattgaaatttgggaagcgagtgaaaagcgggaaattcaggagcgcctcgacacccatcaagtcatcgaggcatccgcgcagatcattgaacacacgccggaagccgagctgaaaatgaaagtcggagaaacagagattaaaggattactggctgatttcggcgaatccatccatctcgcaaaagtgaacgggcgctatgtcgcgctcattgaggcggagacgatctcgtttgaaaaaggcagttcgccggtggagtttcataagcctgaggggctgcatgaggtgattgagcggatacggaataaatctgaacaagactgacaaaagtccagacgccatgttctggactttctttatttaataaggctctttgagcaatcgatagcattcacttatgatgtcttggacgccgggcgttccctttatctcgcggcggacgatttcagatgagagattctgcacctgtaatgcccgctccgcccgtctttcgaagtatgcttgacatgcagtttcatggttttcgtgcttttgcagttcttcactaagcacaatcgcgtcttcaatcgccatcgccgctccctgcgccaatgtcggcgctcctgcatggacggcatccccgcccagaacgacgcggcctctgtgccacggttctttgaccgccatctgctcaatcttatgaaacaaaacgggatattcctttgacatattctctgtcacaaacttcactcccggaattccgcgcagcaagtctttcacccgttcaaaacgcgtgtcctcgtcatccctgaagtcagcgtcatacggccggatgataaatacgtatcctgttttttcagagagcggcacgactccgacctgcgtctgcccttttttatacatcagtgtcgaatcatgaaatatcggctcgggaaaagaaatgtaaaatctgtgcgctcccatgccgagatactccgttttcacttctctttgcagcatttgatcgcggacagcggagcggatgccgtcaaagccggcgagaatgtcagccgtcatcgcggttccgtctgcacaatgcaccgttatgtcatctgccgtttcttcgtaagacacgacttttttaccgagcagaatcgtgacccccgccgcttcagcatgctttttgaggatatcgtttaacgtttgccgcaatatattattccgccccggcaatgaatcatctaaaaacgcctcactcactttaaactgcagcgttccgttttcatcatgctgcttcagccattccgtttgaaagccgtgttgacagcattcatcatacacaccgatttcccgcagcacccgcagcgcattttgaggctggagaatgcccgctccgctttttcgcatgtcggacgccgcctcgcaaagggtcacttcaaaacccgctctgccgagagaaatcgctgcggacaggccgccgatccctccgcccgctatgatgatctttttcacttcatggttcatcacgataccgccttctctatttatttattattcattaactattagccaccttactatatagctaggctgaaaaactgtcaatctttataggttgccttttgaatccggcaagcttatactttgaatcactaaaatggtacggaggcttacaaaaatggagttgagacatttgccggattactcgcagattgccggacgcgctgggatttacgccgatatggatgctgaatcattgaaaacatttttgacgttatttgatatgtctaaaaaaatgaatcaggtcatggagcattatttctcaagtcacggattgtccgaagggaaattcaaaattttaatgtttctgtttgacgcacccggccacagcctgagtccgacggagctggcgaaaaaatccaatgtcaccaaagcgaccatcaccggattgatcgacggactcgcacgggacggctttgtaaaccgcagccggcataccggcgacagacgaaaaatcagcatcgaactcacaaaggaaggaaaagaaaagctgatgctgtttcttcccggccacttctccaatatttcaggagtcatggaaagcttcaccgctgaacaaaaagcggaattgacaaaaatgcttgaagtattatttgataagcttctgctgttttccggcggcagaacataaaaaggcgcccctctcagcagggcgcctttttcgcgcggttaatcatcactgtttaaaattccgaaaaaccgcagcaggttgataaacaggttaataaagtcgatataaagcgtcaatgccatcaaaggaatcaaatcagccgtgatgtcccggtgcttgatctggttcagatcgtataagatgtacattgaaaacacaatcgtcccgatgacggaatacgccatcatggcggcggaattcagcgggctgaaaatattaaagattcccactgcgagaagcgcgataacagcgacaagcaagaaggaccataaaaacgacaagtcctttttcgtcttagcgccaatcgtgccgagcaccgcaaaaatcacaaacgatgaaccgaatgcctccaatacgacataggcccccgctgcggacgcataatggctgataatcggaaacagcgtcattccggaaatgaaagcgaatgaaaacacaaacacatatccgacggctttttttcggcgcagccaaaatgcggcgatgatcatggcgacctctaagaccgacagcggcagcatgaatgccggcggaatgaactggcccgtatacaggccgattgtcgcaactaacagtgtaaacacaaataccgttataatgcgctgcataatagattgtttgctctcataagcagcagtttgcatgtcaaaagtcctcccaaaaaatgatcgtgataggtctattataaataaaatgggagaaatttgtatgattttaagaagattttaaggatgtcaggcctgacgttttgctgcgcactcctgcatatccatgaaatcatgcagttttttcgtcaatccgccgtgcccgaatcggatattccccttctgccccggcgttttcgcgaaatcgagaaatgccagcacataaagacgcctgacgggaatcggaatgacgcccgcatcataaaaccagccgtcaattgtattgagcacgcctttgttaatgccgtattgcttcgtgcaccaatgcagaaagcgcacttcgggcaggtgcagataccggctctcccggaaaggaacagttgaatgcttcatatgtaccgcctcctgtcattggctgttttttaagattgttttacttctttgctcttcagggaaaatcgatatttctccaccttatcaatttgtgtcacttgggaattatgaaccgtaatctgaacagtcccgaaatcgagcgtttccagcgcactgataatcttttcgatcacatgcggatctacgtttcctttggacgtcatcatgctccccctttatgtctggccgttcgtcttttgacaatgagtgttttaattcatactattctgataagaaatatataattatactattatgttttcattcagaaatcaataacatttacacaatttttggatatgttttctttgcgaaaactttcacttccttcgctttgatataaaccgtgtcgccgcccccgcccccaaggcgtcatattgctctttttaagaacgcaatcttccgttccgacatatttaaattgttttccgctgacaaaaaaagcgccccgcctctggacggagcaccttttttctatgcttttgcttcctcgatcacacatgtgacacccatgctggcgagcgcttgctccagagatccgtaagtttgatactctgaaaaatcaagccccaattggatagaagtctgtgccacatcaggccgaatgccggaaaacacggttctgatgccgaggagaaataacgttttcgacagcatatacaattgctgcgccaccatcgtatcgacaatgggcacaccggacagatcaatcacaaggtttgtgatccgtttggcgacacagttttccggcaccgactccaaaatcacgcgcgcccgtctcgtatcaatcgagccgatgagcggcagagtgccgatcgtatccgcgatcaaaataaccggacagctcaattcggaaataagctcctgctgagatgacagcctcgcgatcattaatttctgaaactgttcagtaaaatccgtcatcagctgatcaaacgagccgttgacaaggtgattccagcggcgggcatcctcgtttgttacggtgtcctgatgctcatccataaaacgggtgaccgcctcccaaaagacggttcttgaattgccgatcgcctcaacgacctcatgaacttccgcgtcttgctccactctgcttttcgctacctgtgcggcccatttttctttgttatgctgaaaaacggccggatcttccaaaaaagcgcttgcgatgaccgtgtttgtaaaggtatgctgctcgatcagcagccgtttcatttcctcacttaattgatccgcagaataaaaacgccctctcagcttccgtctcagcttgagccatttttccgtcagctctgccgaatgtgtaataatataatcatgaagtaattggtctttgttcactgccgtctcctctttcaagaatatgtacttttgtctaaattataaatcggaatcgccgatcgcactagagaaattaaaaaaacctgcacattaaagcttttgattgcttttttcggcaggaggatacactataaaagaaatgaaacaggaggtcagtatgatgatcaaaaaaatcgcgacagtcgccgtatacactgatgatcagcaaaaagcgaaaacattctggacggaaaaagcggggtttgaaaccgtcgccgagcatccgatgggcccgggcgccttctggcttgaggtagcgcccaaaggagccgccactcatttggttatttatccgaaatcgatgatgaaaggggccgagcatatgaaggcttctatcgtatttgagtgtgaagatgtctttgccgcatacgaacagatgaaaaagaacggcatcacctttttagatgaaccgaaacaaatggactggggcagcttcgtgcaatttaaagatgaggatggtcatgtctttctcctgaaatcgtaatccgtcaggcaccccaattgactttgagaatcattttcatttaaaatgttggataaagcgtgaaaaggattggagagctgccagatgtttgtgcaaatcagaaaaatgaccgtaaaagaaggacatgccgacaaagtaatcgaacgcttcagttcagaaggcgtgattgaaaagcaggaaggtttgatagacgtaacagtcctggaaaaaaaagtccgccgcggtgatgaagaagtcgtcgtattaatccgctgggagtcagaagatcattggaaacaatgggaaaaaagcgaagaccacatcgcggcccacaaagcaaaccaaggcaagccgaaacctgattatatgcttgggacggatgtcggtatgtatcatgtcagagccgttaaaacaggcgtacacgaaaaataataaagagcatttgccccagggcaatgctctttttattttttctcctcatacggcaggacaaacagcggtttatcaggcttccattccgcatacagcacgtcctccgtttttttgatgttcagctttttcagctcctgattcagctgcttttcttccagcccggcttctttcagattttcatacagcacttcgccgtcaataatcaacgtgaccggcaaagagacctgcttcggctttatttgcatgtcgccgtttttcgtcgtgtcatattgaaatttcggcaggacgctgaccatcccgtttgtttctaaaatcgcgtactccgcttcctgtatggaaaagcaattcgcctgtctgagaaggctttgcaattgattaatgtccagcttattctttttcagcacatcatatttcagttttcctttatgtatgataatactcggctcgccttccaacagctttctggagctttttactttctgcgtaatcagttcgatgagataaattaaaatcccccataacagagaggcaaaaatgatttcaaagatcctgacgcctttatcatacaccgcatttccgaccagttcgccgaggatgagcgcggaaataaaatcaaacggcgtaatttgcgagaattgagtttttccaagcaattttaaaatcacaaataaaatacccaaaccgcatactaactcccaagccactgtaagtaaatgtcccatattcgcaccttcttcttaaaagtcattaccattatggacattcgcctgttttctatacagcggccggcaacacacaaaaaaacgcagccgaggccgcgttttttcacttctgcttactgttttcgattcgatctgacgacccgtaagcacacctcagcggcataaccggcggccgctccggaacccgcaaacatcgcggcaagccccaagcccattccttcccagccgccgacaccgaaaatgctgtaaacaaccgtaccgaaagcagtcaggcccagcaccgccaaaaggcactcaggccacatctttttcggccatttcttgcggagcacagccgatacggcaaagttaagacaaaatgcggccagacagatcagataaaaaaaccccatgtcttttacctccgtcatgagaagctttttatttactcacctttttttcaaacaaatgataacccggcgcgagtccttttgattcgtaccccattccgctgtaaaacgactgaagcgccttgttttcggacacgcaatcgagccggattttcgtttttcccggacaagacacacccgtctccgcccaagtcatgattgtccggccgagccccgcccctgcaaaccgcctgttaatcgccagtcgatggagatatacggactcctcatgtccttcctcgccccatagacgtctgtcccacccgcttgcttcgggaagcagcatgacgacgccggccagctcttcattctgcctgaataaaaaaacatacccttgggcgatcgcctcccgcatattgtgggtatcttccccttctagaaggccgctccactggttcgaccctttatcgcgaagccattctgccgcttgcacgagcagatccatgacctcttcttcatcatccttccgggcggaggtgacccggaatgcccccgccttctcctccgtaatcgtaaatggtgtcataaaatcctcctgtaatcagaatattcgacacctttattatagaccaaacgcagaaaggaaaaaaacagccgtcgggtttgagggccgtttaaaaaattttcttcttatcacgttcttcttttaaaatctcaaccgcttccctgaaacgcatagagtggacgatttcacgctcacgcagaaaacggagtgaatcattcaggtcaggatcatcggaaatatcaataatccattgatacgtcgctctcgccttttcttcagccgcaatatcctcatataaatcagcgatcggatctcccttcgcctgtatgtaagacgctgtgaacggaactccggccgcattgtgataaaacagcgcgctgtcatggttgacgtaatgatcactgagccctgcatcacgcagctgctccggggtcgcatcttttgtcagcttataaatcatcgtcgcaatcatttctaaatgcgcaaactcctccgtgccgatatccgtcagcaggccaatcaccttgtcaggaatcgtgtagcgctggtttaagtaccggagcgctgcggccaattcgccgtccgccccgccgtattgttcaatgagaaacttagccagcatcgggttgcatgtactgactttaaccggatactgcagctttttttcatatacccacatttacagatccctccttatacttgccatggccaaggaccgcggccccagtcccattgagcgccgacctgactcacgccgaattgcagaagcggtccgtactcaggctcaaaccgctttctcagctgtcttgagtaccgggaatattcatgaaactgctgaagcgcgagacggtcatggggatgcgtatccagataaagcgtcagctccaccaagacaaagtccgccgcctgaatttgctccagcagccgatagtattcatcatcaatctttttcgccatattcgattcccccccgataaggattatcatagaaatcgtaaagatccttccaaagggtcccttttctcaatgcctccatcggagaaaactgctccaagtgatacggctgaaaccgcatataaagatgcggcggcgttctgtagtattttctcccgatcggcgggcagggatcaaaccggctgtggaagggtttataggatttgaccggtgtaaacggctgattttctttcattacgatcctcctttcctaaacacatgaccttaataggtatgaatccgtaccggcatttatgccctgtaagaaaataaaaaagcccgttagaaacggactcaatgcaactcatctggaattttaagtaaataaatcataatgaaaaatctgcttaaaaacgctgataatgtttcaatgtatattccgtaatttgttgatcatattcaggatattcatatctcaataaatcagccactgactttgaatatgctctaaagagaccctggcagtcaaacaatgccttccacacgctttcataagtattgccgacataagtattcagcaggatttcccaatctttcgcattcatgtaatgttgaatatacttataattcttccctacacttaatgaaaactgattctctatcccgatattccacgcaatcatacgcaaaacattaggccttaaaatgtcattcatatgatccagcgcaaacagtatttctttacgcattaatcctttaatcacataggttgaaaccatccaaaattcattgcagcaatcatcaaactctctgggagtcggtttctttatatgatattgttcatcactcgcaataatcttactattgattcggtcatccttgtctaatactatttccgccaaaccatcactctgtgtaaaataatcctctgtttgactcagagggatcaaagttaagtcgattttatgatgatctttaaatagcattagataggagaaccagtctccgagctccggagggaaaagttccatatcttcaggtttttgcatcatcaatctttcgccaaactgatccagccagctttcgtcagatgtgaaagagtccatatcggtcacaaaataagaaatatcatagtcttgaaatttgtctctcggtacatttttattggttcttgatccctctaaagtgacaagacggattctctcgtccttcatcgcaatatcaagaatcaatttcatcatttcgtcttcacttctcacatgtaaaaccccccgataaagagatttttacagatctgctttaaaagtcctatgtacttgatgattttgctccaatcgtaacacagctgcaataacatgagaagagcactcttgctgttccaagagtgctttttcccgaatgatcagatatattggctgtcccgatgatgatgatggaacgggtagccgccgtagcctccgaaaccgtaccccggatatcccccgaagcctccgtagccgccgtagccgccaaaaccgccgtaac

SEQ ID NO: 47 - DNA, 11163 bp, Bacillus amyloliquefaciens
ttttgtaatcaggattttacggttcctggtagacaccctcaaaccatatcattgaggttatacaatgtatgcaatattcggttgtgtccgtttctgcaaaaaattctaccataatagtgagggatattccatagaaaattcgaggaaatcctttcaaatttcaatatcggcggctgtaacgtcattgatgaagcagggaaaaaaatttatgataaccgtaaggagtctatacagatcaaacattatacagccggaggaaaccgatgaataagtacgaaaaaatcgccaacgaaatgagaaagaggattaaaagcagtgtatatgacatagatcagccgatcccggatgaaaagacgctcgctgcggagttcgggtgcagccggatgacgatgaagcgggcgcttgatacacttgcggctgaagggatgcttttcagaaaaagagggcacggcacgtttatcattcaatcagccatgcaggatgagcacgttcacgtagtcagcaacgaaattctcggcctgagcaatttgttaaaaggaaagaatatcaagagcaaagtcatccggtttgaagtgcagtttccgtctcaagatgtcgccgcacatttggccatcgatgaaaagactcccgtctattatgtagtaaggctcagaattgttgagggcgaaccgtacgttcttgaaaaaacgtacatgccggcgagccttatacccggcattaatgacgaggtgctcaaccattccatctatgatcatattacgcgggaactgcagctcaaaatcgcaggctcacacagaaaaatcagagcgtgcaagtcggatgatatggatcagcaatatctcggctgccggccggatgacccgatacttgaagtcgagcatgtaggctttttggacaacggcactccctttgaatattcattttcccgccaccgtcatgacaagtttgtcgtgacctcagtcaatataaaacgttcataaaagcgccgaagagtgagagaaaaactcactctttttttgttgccgctgatttacatcttcgcttcttttatgttatattacccaatgatagaatcatcctacaaatttcagaggtgttttgatggagatatccaaaacaagcagactgtcgctcgtagaacaagtggtgacgcaaattgaatcgttaattcaatcggataaatggccggtcgggacgcgcattccccctgagctggatttaatgaagcaatttgatgtgagccgaaacacattgcgtgaggctattcgggcgctcgtacatgccggcctgcttcagacaaggcaggggagcggtacgtatgtcagctcatccagtgttctcggcgcggcattttaccgccatattaaaaaatcaaatttgcttgaaacattagaagtcagatacgcactcgaaagagaagctgcacgattggcggcggaaaggcgtaatgacgaagacctgaaagcactgaaggcatgcttggatgaatgtgaagcggccttgcaaaatgaagatcgaaaacggtatgccgaagccgacattaagctgcacaaaaccattgtacaggcggcccataacaacatgctttctgatctttacgagcatatgacggaggcgctttgtgcgtcagtccataacctgttggaaatcacccctgctatccggatccacacccagcttgccgccgcgattatcggacagaaaccggatcaggccatggaggccgtcaaccaatacatcagagtatttaaagatacaatacacatggaggatgaacatgaaaattaaagacgaacatcaaattctgcaagcaagtcagcgtaaaaaactgatattgctggtcatcggagtcatattgataggggccaacctcagagcgcctctgacatcggtcggaccgctcgtttcctcaattcgggacagccttggcatgaccaatgcggctgccggcaccattacgacagtgccgcttttggcctttgcatgtctgtcgccgtttgttcctttattgtcccggcgcttcgggaccgagattgtcttactgtcatcattaattgtcctgacagccggaactctgctgcgctccatcgccggaatcggcactctctttttcggaacgatcctgttgggattgtcgatcgccgtatgcaacgtcctgctgccgagtctcattaaacataagtttcccggaaatttaggcatcatgaccggcgtctactcggtttctatgaatctgtgcggcgcgattgcatccggcatcagcgtgccgatcgcctcttcagcggggttaggctggaaaggcgcgctcggctgctgggctatcctttctttcattgcgtttgtcatgtggattccgcaaatgcgaggacgcgaactgcccgtccgcacgactgggacaaacggagagaagaaaagcagtctgctgcggtctccgcttgcttggaaggtgacgatgttcatggggctgcaatcccttattttttacaccgtcatcgcttggctgccggaaattcttcagcagaatggactcagctcaagtaaggcgggatggatgctttcattaatgcaattctcagtcctgccgattacttttatcgtgccgatcgctgccgctaaaatgaaaaatcagcgcgcactcgccggactgacggctttatttttccttatcggcattgccggcgttcttttcggaagcccggctctcactccgctatgggtcattttgatcggaattgcgggaggatgtgcattcagcttggcgatgatgttcttcagtctgcggacccggcatgttcatgaagccgcggcgctttccggcatggcccagtcattcggatacctgcttgccgcgttcgggccgctcgtattcggtttgctgcatgacatcacgcacggctggacggttccgttattcatgctgatcgcagtctccgttctgatcttcattttcggagtcggagcgggaaaagcggaacagatcaaaacagcataaaaaaacaaagggcccgcttagggtcctttgttttttatttgaaaagctgtctcaggccgtcacgctgtcagttttaagccgatgacaccgatgaggataagccccagagacaccaattgtgacagattgaatttttctttaaaccaaagtatgctcacggccgaaacgccgatgcttcccatgccggtccaagccgcatacgcgacacctgtgggaagaacctgcatcgctccggaaaggcaaaagaatgaaagcataaagcctgttaccatgacaatcagcggccacttttttttaaaaccgtcaatatgtttcatggcaacggccgctacaacttcctccgctccggcaataaataacagcagccatgccattaatgttcaccccttgtttcagtttctttcgtaaataccttcattcctaaaatgccggacaacagcaaagccaaaaagaatatttgcccgattgaaaacgattcgcctaaaatgacgcccgttacatatgtgccgacggtgcctattccgacaaaaacggtatatgcggcagccatcggaatttttttataagagcggatcagcatcagaaagctgacggcaatcagaaggaaaataccaatccaatcaaaaagcgaatccgcatgcttcagggcggacgcccaaactacttctaacagtccggctatcaatacaagcagccaatacatgatacagtcacctcagttagttatgaatgaatgtcagtcatttttgcagcggtcaaaaatgatcggtctccgccaatcatttctgcaagcttcttttgagaaagctgaatatttcttttttatatacttcaagatcgacatcctgttcacagccgatataaaaccgttcagccgcgttctcgacaacgttgataatcgttctggccgtccatctgacatgaatgccgctgtggacctcaccctgttcaatggccgtattgatcacgccttccagccaggaataataaggctgataaatggcttcccatttctccatcgaatgatcgatggcaagaccggaataacagagaacgataatatctttatgaagccgggtgatgtgaaatgtctcatctaccaaaatgtccagcaacgtccaaaaatcttcagaaccgtccgttttcccttttatcctgtccagcgtagtgtcgagcaggttttctgcaatcgcggatatcagtgcgtttttagaagaaaaatataagtaaaacgtcccttgggccgttccggcttttttgacgatttctgaaatggatgctttgtctaatcctttttcagaaatgacttcaatcgcggcttgcaggatcttttcgtattttcccgagctttgttttgccaatagaggggttcctccttttatgaatgactgtcattcattttatcgcacattcgcttttttgtcatcccttaaaataaaaataccggaaagaagaccatacttctttccggcattcgtcatttatcactgtcgatcatagccttcggcagtcccgtatattttgcccagtaataaataccgagcgaaccgatggcgatcagaatcaggtcaagcggattgctgataatgcccaatccgtggccgaacgagccgagataggagaaaatcagcatcatgacataaaagccgacaatccaccatgctgatttcagctgctggcgtatgctgacatcatctttgggagcatatttactgaaacaaagatagatcagaaacatgacaatttgagaaccgagaagccaggatacggtgcgccatccggaccaatatacaatataagaggtaaaaataaacgacagcggtccgatgatgctcatcccttttaaataaaacggtctgttaatattcttcgcgttgactctcagcgccgcagaagaaatcggcgcaatcgcataagacagaatcaatgcgacggagcatacgttgacaagagcgttccaagaagggaacggaagcgtccaaaaaacagccagaccgaacgaaagccaaagggaggcacgcggtgtcccggtttctttattgactttagaaaaaatgctgaataatgttccgtttctggcccaggcatagacgagacgtgaagtcgtattcataaagatatttccgttaccgcccggtgataaaatcgcatctaaaatgaccaatgtcgccagccaccccaaaccgagcaaaacggcgatatctttgaacggaagggagaattcagtcccgatagccggccatccgtgcttcagggtatccgccgggatcgccccgataaaagtgagctgcagcacggtgtaaataatagtagaaacgataatacagacaatcaatgcgatcggaatgtttcgcttcggattctgaacttcactcgcgacagccacaatcggatgcagcccaaggtatgcaaacatgacgccgcctgtggaaatcgcggcctgaattccagtgaaaccaaaaggcgcgaatccgtgaacggtcatattgcccgggtgaaaatgaaaaatcagtaccacaattaccgtaatcggtacgacatatttaaaaatcgaaataatgaagtttgctttcgcaaaggttttgacactccagtaattgaggaggaagaacaggcagagcagcgcaaattgcaatatccacccggcaattgtcggagaatcggagccttttacggtcaaaccgggaaaccaatacgccacgtattggcggacggccgtgacttctatagaaataagactcgtgtatgccacaatggtgacaaaggaaattaaatatccgacgaggtgtccgtgtgaatatacgggataccggataattcccccggtccgcggcagcgcggcgcccagttccgcataaaccaagccgatcaataagatgattcccccgccgatcagccaggaaaaaacgcctgatgggcccgctttagaggcgacgttactgacggcaaacagccatgccgaaccgaatatggctcccatgccgattaaaataagatcaaaaagtgacatagttttctggaagtttccttgcttagacattcgctgcctccttagaaaagacattgttctctttacataattcccattatcattcaaacatacccagccggccggctggaaaattaggacaactttcgaaacgaagtatgtacagcaatgtgctcacattataataacggccgtatggcaagatctcccggcttatattccccgttttaaacacattcaaacctcatattcagaaaaacaaaaaacgcccgaaacaggcgttttttgttacaagttcatatctttcagtccggggctgtgctcattcggaagttcaggaagttccggcacggggaaacctttaggaggctcggagacacttaattcgccgccgtttcggctcggcgtcgttccctgcagaatttctccgatccgtgtcggatccagtctgaaattaaattgggtattatgataacccatctcaacgaatttccggcattccgggtatttttcaatatcataattcggcacgggaaataatttgccccattcgacacccagtgtttccaacgcttttgtaaatgcattttgatgggcgttgtcacggacgatcagaaaaccgagtgtttctctgaacgtctgatttgaactcatttcataaatgcgcgtcttttgcagcacgccggttgattccagcacgacattgtccaataaatcggaaatcaggttcccgtggttgtatacccaagacccgttccatggattgccgccggcgtctacaggaagagaactttgcgccccgatgataaaatggtgcggattggcgtgtttcactgcttcgtcaagcggcgcctgatctgctgcctgatttccagggccctcagcgccgctttcatctagcagcgcattgatcgtactttggacgagttcaacgtgtgcgatctcttctaaaaatacaccgcgaagcaggtcacggaactgtttttcttttcctctgaaattagagctttggaaaaagtattgcatcatcgtccgcatttctccgtagtgcccgcctaaaatttcctgaagcaccttggctgcggccgggtccggcttgtccggtttaatgatattgatcagctcttctttgtaataatacataaacagcgccccctgaaagaagttttcggttcttctgttagtgtctttgcaaagtcagtttttatgtatcggcatcaaaaaaaggacggaaaccgtgtccgtccttttgtgttaagcctcaaccgtcccgcgaagtttcgtgttgacaagcccgttccatccttgatccatcgtactgtgaatctcggagcttttccgattgactttattgataacggcttccggctctttccatccgccgtgaatgagagtgaattccgtatctccgctttccgtttcctttaagacaaaagaaacgatccagccttccgtatcccacgaaaaagaaaggcggtacggcgcttcaatatccagcagcttgcaaggagacggaccgaacggagattccagctgaaactcactgtcttcttgaggtgtgaaatcattcggcataaaccagagagacaggccgtccgcagtggagaccgtatcccagacaacttgtatcggcgccttgaaaacggcggtatgaataatgtccggtaatggctgattgctgctgttgttgtttttgttatctttgttttgtttatcagacatgctgcgtaaccactctttcgctgtttttacttttgatcatactacacggggcaggacatttgaaatcaaatcaaacttattctatgcttttccaaagccattcaattcattttaaggagacgtagtgatgacagatcaatttaaagcgttagtagtcgatcaacgtgaagaccggttttcagtcagcgtacgggagctggcggttcaggaccttcccgagggtgaagtgctgattaaggtttgctattcaggggtgaattataaagacagcttggctgccattcctgacggcaagattgtaacgtcgtatcctttcgtgccgggaattgatttagcgggaatcgtcgtttcctcagatgacgcccgtttcaaagagggggacaaagtcattgcgacaagctacggcataggtgtttcccgctttggcggttatagcgggatggcccgcattccggcagattggattgtgccgctgcctgaaggtctgacacttaaagaagccatgacgatcggaaccgccggcttcactgccgcattgtccgttcagcgtcttgaagaaaaccatgccgctcctgaaaaagggaaggtgctggtcacgggagcgacaggcggcgtcggaagctttgccgtctccattctttcaaccttaggttacgaggttgaggccagtacgggaaaagaagacgaaagcggctatttgaagagcctcggagcaaagacggtcattcaccgtgatgaagtgtataacggcacgttaaaaccaatgcaaaagcaaaaatgggcagcggccgtcgatccggtcggaggtgagccgcttgcttcagttctcagccagattcagtacggcggatcagttgctgtgagcggactgacagcgggaacgaaactcccggctacagtctttccgtttatattgcgcggcgtcagtctcttgggaatcgattccgtattctgtccgatggagacaagaaagaaaacatggcagcgtttagctgatgacttcaagcctgcagatctggaggcctttattcaaaaggaaattacacttgaagagctgccgaatacgcttcctgcccttttaaaaggagaagcgagaggaagaacgatcgttacaataaacgaagaataaatcaaaaacccccaatcagcagttgggggttttcaatatataatcaattattgattacaatcggggtaattcgttgagcgtgttacgaaaatgcattaatggaaaacgtaaattgattatgtgtgggtataatataggtaagttataaaattttctgaaatatttattgactgaaagcgcttttaaaattatgataataacataagtgccaataatatcattataactttactaaaaagtaactataaagtaacaatttggcgagaggggagagcgaataatcactataaatgataacgctttcggagtattttcttcttatataactgttttggacagtcagaaattgtatgcagacgttataggtgtaaacattgataactgaatattccgatattatctctgtgtaaaaactaggaggatttgaagatgaataaaaatagcagccagcattcatttttgagaaccatcattttagtatcgacattcgggggacttcttttcggctacgataccggtgtaattaatggggcgctgccgtttatggcggaagctgaccagcttaatcttaccgctttgactgaagggatggtggcgagctccttgctcttgggggctgcgatcggcgcggttttcggagggagattgtcggactataacggcagacgtaaaaatatccttatccttgccgttttgttctttgcagcaacgcttggatgtacactggcgcctaacgtatcggttatgatcatctcccgttttctgctggggcttgccgtcgggggagcatccgtaaccgttccggcatatttggctgaaatgtcgccggcggaaagccgagggagaatggttacccaaaatgaattgatgattgtaacgggccagctgcttgccttcacgtgtaatgctatcatcggcaatgtgcttggtgatacctctcacgcttggcgttatatgctcgttatcgcggcccttccggcgttattcttgtttttcggtatgctgaaagttcctgaaagtccgcgctggttggtttctaaaggaagaaaagaagatgctctgcacgttctccggcgaataaggaatgaagagaaagcgaagtctgagctcgctgagattgaatctgcctttcataaggaagctgagatggagcaggcgacttttaaggatcttgccgttccgtgggtgcgccgcattgtgtttatcgggatcggaattgcggtagtgcagcagctcaccggcgtgaattcaattatgtattatggaactcaaattttaaaagatgccggtttcgagacaaaagccgcattaatcggcaatatcgctaacggtgtgatttcggtgctcgcgacttttgtgggaatatggcttctcggtaaagtcggccgccgtccgatgctggtgacggggctgatcggaacgactgcggtgctgcttttgatcggagttctgtctgtcgtgctgaaaggatcgcctgctcttccttatgtggttctttcattaacagtcactttccttgcgtttcagcagggggctgtctctccggtgacctggctgatgctgtcggagatattcccgcttcgattgcggggacttggtatgggggtcactgtcttctgcctctggatcgtgaacttccttgtgggtttaacttttccgatcctgctcgcaaacatcggattgtctgcaaccttcttcatttttgtcctgttaggggtagcgtccgttatatttgtgaaaaggtttcttccggaaacgaaaggtctgtcgctcgaacagcttgaacaaaacttccgtgcttatgaaaaaacagatcgtaatagcgcagaagctgaggtgagcgggtaatctgaatagacgcggggttcctaggaatcctgcttttttatttattatatagaagggaataataagtgagaaaaaagtttcgtaaaagtgttgacctaatttgaagtgcatggtatattattaaacgtcgctgatgaacaaagcgataacgacaaatgagaaaatgatcttttaaaaaaagactttacaaattctcaaaagcgtgtataataaataaggtcgagaaaaagacttcgaaaagaaataaaaaaaacacttgacatcataactgattggtagtatgatagttaagtcgcctgataagcgcccgtagctcaattggatagagcgtttgactacggatcaaaaggttaggggttcgactcctctcgggcgcgccaattcaaatgcgggtgtagtttagtggtaaaacctcagccttccaagctgatgtcgtgagttcgattctcatcacccgctccattataatgatctttgaaaact

SEQ ID NO: 48 - DNA, 34529 bp, Bacillus amyloliquefaciens
atttttatttgattacatatgaatacgatttttaaaaaatggaagtctccagccgaatcactaatgttaatatttgacagcagagaatccgctgagttctgttttatgaaaactgaaataatatatagaattttcaaaaaagttattttcatttttatatttttcgctataatatgatgtaggagaaaggaatgatgtgctgaaacatttcatgcgaaaaataagaatttagtcattatcgctattgttatctgaatattctaacatatattgatttacaaggagtgaagcagatgaaggggagcatattcagaaagaaaagcattcaggacctgcttgccgcaacgggcggggaaaagtcgctgaaaagagagttaggggcctttgatctgacccttctggggataggggccatcatcggaacgggaatttttgtattaaccggaacaggcgctgtcacggcggggccggggctgactgtttcatttgtcatcgccgctcttgcgtgtttatttgcggctttatcatatgcggaatttgcttcaagcgtcccggtttccggttccgtctacacgtttacttatgcgacactgggtgaacttctcgcatttatcatcggatgggatttaatcttggaatatatgctcgccgtcagcgcggtttcggtcggctggtccggctattttcaatcattcttggcgggcttcggcgttcatcttccgactgcattaacggccgcgccgggatccattaaaggcacggtcacattctttaatctccccgcatttgttatcgtgcttgcgattacattcctcctctacttaggcattaaggaatcgaagcgggtcaataatattatggtcattttgaaggttctggttgttctattgtttatcgccgttgcggccgtatatgtcaaacctcacaactggcagccgtttataccgatggggttcggcggtgttttcagtgccgcggcgctcgttttcttctcttttatcggttttgacgccgtctcttccgccgctgaagaaacgaaaaatccggcgaaggatctgccgaaaggaattatcttttcattaatcgtctgcactgtgctgtatgtgaccgtatcggcgattatgacgggcgtcgttccgtttgcccgctttgaaggcgttgaccatcccgtgtctctcgtcctgcagatggccggacagaattgggtggccgggattattgatatcggcgcagtgttgggaatgacaacggtgatgctcgtcatgctgtacggccagacgagggtgatgtttgccatgtcccgtgacggtttggtgccgggggcgctttcaaaagtccatccgaagcataaaacgccgcacgtggtgacatgggtgttcggcatcctgtcggcattactcggctcactcgtcccgcttgatgagctggcgaagctggtgaacatcggcacgcttgccgcatttgtcctgatttcagtagcggttatcgtattgagaaagaaacagcctgatctgccaagagcttttaaatgtccgggggttccctttattccgatattatccattctgttctgcgtatttttgattattaaccttggcgccaccaccatattccgtttctttatctggctgatcatcggtctggtgatttatttcttatattcgagaaagcattcgaaattaaacggggatttgtaaggagcggcacccgccgctcctttttatttttcggaataatgaaacatattgaaatgggcttaagttatcgcagcgaataagggataatatagggcggaagggaagtggaaagtcgtgtctgaccaaaaaagggttcaatgggcctcaaaaataggatttattatggccgctgccggttcggcgatcggcctgggagccatttggaagttcccttacgtagcgggtacgaacggaggaggcgctttttttcttgtattcgtcctctttaccgtacttttaggctatccgcttttgctcggtgaatttattttcggaagacggagccagacaaatgcgattgatgcctacaaacaagccgcgccgaagtcggtatggcacctcacgggttatgtgggtgtggcggcctgttttttagttttgtctttttacagtgttgtcggcgggtggattttgctttatgtgttaaaagctgttacgggttctttatccgggctcactcaggagcagtacggaacggtgttcgggacggtcattgaaaatccgatccagactctcgccgcgcagcttgtatttatgatcatgaccgtggcggtcgtcgcaaaaggcgtgcagaaagggattgaacgtgtcagtgcggtgctgatgccggttttattcgtgctgtttctattgcttgtgctgcgatcagtcacgctcgatcatgccgttgaggggattagatttttattggttccgcactttgaagatttgacgccggaatccatcctatatgctttaggacaggcgttctttacattaacgctcggcgtttcggtcatggtgacatacagttcgtatctgccgaaaacccaaaaccttccgggatcggcgggttccattgttgtgatgaatgtgctcgtcacgctgtttgcgggactggccatttttccggcggttttttcgttcggctttaaaccggatgaagggcctacactgctgtttaccgtactgccggctgtgtttgaccggctgccgttcggctcgctgttttttatcagctttctggcggtctttttcttcgccgcgctgacttcggccttttcgatggtggaaattatcgtagcgactgtcgggaaaggtgatgaaacgaaaaggaagaagctgtcgtggacaagcggtctgctcattttcttagtcggaattccgtcctgtttatcatacggtgttctcggtgatgttcatttgttcggaaaaacgttttttgatctagcggatttcacagtgagcaatgtgctgattccgctcggcgctttattaatatcaatcttcatcccgctgaaaataccgaagcgggagctgttcgccgagatgaaaagcggttccgccatcggctatcgtttctttcaggtgtggtatttccttctgaaatatctcgtgccgctggctatcatcgtcgtattgctgcatttaatcggcgttcttccattttaaaaaaacaggcccccgtaaaagggcctgtttttatgtttaaaaaccgaattgcagattcgtatcaacggcaacgatcgtatatacacagacaatgacgaaaaggttgaggatgacaccgagcagtcccgggcccgtccgtccttttttaataaacagctcaatgatgccgaacggcacggcggccatcgcaaacggcagcatctgataagaatagaaagtcacattgctgatgattgccacgttcaaaagcagcagcgacaaaatcgcggtaccgactgatatccagccgaaaacattatgctctttaaaaattcttaccaattccataattccacctcaccgatgtttgctgcttttactgttttgtttttcagcagacgttcgatttcttttgtcggccccgtcacgacagagccgtatacgttcattccgtgatgttcaacatagtcgattcggctgccaagattcatgtctttgcgtttcgatattgcatgagcccattttttatggcgggacataaattcaagggcattgataaattgttcacggtctgtctgtccttgcgtttcgaaagaggacaccatcttggaatctttcccgggaaatcctaacggctcggcataaggactgtctttcagatttttctccgtttcgaccgcgttccataaaaacttcacatcgtattttttaaaagtcgaatatacttgagaagaagggtaggcccggtcataagaaagatagacctccgccacgcttccttcaggcaatttttttaaggtctgtccggctttttcaatcgtgcgttcctttaagccggaaggatgggcgaaataatgctttgcctgtgccgcgtctagatcatagtagttaacggcaggcgatttgacagtatctaaaaacatttcaattcgttctccgccgacggatttcgtttttgtgccgatctgcttttgcagcggaaattccgtattcattccaaacagcttcacctggcttttcagtccggaggtatcgacgaggacgttcggcattgtggtcgccaccgtcactgccgcggtctccattaattgattgccggtgctttcttttcctcccagaccgtaatagaggtagcttcctaaagtgcaaagcggcaaaatcatcaaagtggagatgacggcgagaactgaaatccgcaaatacgatttgcgttttccgtatgataaaatggccttctgtttttccgggctgatgccgacgtcccattcccggtcgtcctgcatttcgctttcaatcaactcctgatagacttccagcttttccagctcttcttcaaaggcggccatttcccggtcgctcatttctccatttttgtattggtaaaaacgctttttaaattcttcattcatcattaacacctctattataaagtgctttcagccgctgtctggcacgaaataaaacacttttaaaattagcctctgaaatattcataatatgggatgcttctttgtaattcagttcttttaaataatacagtgttaaggcctcccgataattgtcgggaagttcggacatataccctgtcagcacttccttgatttcaatctgatgagccgggctttgaacagccgtctgaaaaaggctcccaattaagtcatcggaaatggtcacttcctttttatgttttctgacataatctataaacgcatttctcgccacttgaaaaagccatggctttactttgctgtggtcataggagtgaatgtgtatgtatgccctcataaaggtttcctgcagcaaatcttcagcgagatgcttgtcttttgtcatggagagcaggaaccggtaaacatcattcatatacatttggtaaatttcatcgatcgtcactgccttttctcccctctatgttatacacgcataagaaaggtttaaagttgcacgttccatgcaaacggcttaaattcattttcacctcatcaaacaccatttctctatagtacccaaaatccgtcataaaagatagagatcggcggaggaaaaatataattattagtaccaggtaataaaaaatattgttataatagagagagaacacttttgatcattacaacaaaggaagtgcgttatgtataagttttgtgcaaatgccatcaaatgcattctatctctgcgcggaggagtgaaagtgtacaataaagagaatcttccgtctgataaaggattcgttatcgcgtgcacgcatgcgggctgggtggacgtcctcacgctcggtgtcggaatactgccccatcagattcattatatggcgaaaaaagagctgtttcagaaaaagtggatcggacattttttgaagaagattcacgcgttcccggttgaccgtgaaaatccgggcccgagcagcattaaaacgccgattaagcttctgaaggaaggaaagattgtcgggatttttccgagcggtacgagaacatcagaagacgtcccgctgaaaagaggggccgtgaccatcgcccaaatgggaaaagcgccgctcgttccggccgcatataaagggccgtctacgggaaaagcgctgtttaaaaagggaaaaatgcggcttatcatcggcgagccgatttttttggaggacttttccgatcttgcgccgaaggagaggcttgcggccatgacagaagagctgaatgccagaattaaagagcttgagaaaaaacttgaacaattgtaaatgaaaaaaagcttgccgtctgtatcagacgcgcaagcttttttgttatgcttctttttgttcggcggtttccagcagttcatcaaacgccagttttttcacttcgatatatgcgacgtggtggccgtcaatttcattaatgataaattcacagccttcttcgataatcgagtcgtattgttcgacgtcgtatttctgggtaaggaaccagccgccgatggtgtcgacctcgtcattttctaaatggatgccgaggagttcgttcacttgatcaatcaggaccttgccgtcaagcatgtaatggccgtcgccgagtttgcggatttcgttgatttcatcgatatcaaattcatcacggatttccccgacgatttcttcaataatgtcttcaacggtgacaagccccgcggttccgccgtattcatccgacagaatcgccatatgaacccgttccttctgcatttttacaagcagatcgtgaatcggtgccgactcaatcacatggatgatcggattgacaaaatcggtaatcggcgagtcgactgatacttcgccgcttatgcaggcggtcagcacttctttaatgttaataacgccgataatattatctttgtcaccctcttcgacagggtaccgggtatatttttcaatctgaatgatgtccatcatttcagagattttgatatcatgcggcagactgacgatttccgtacgcggaatcatgatttcttttgcaagtctgtcgtcaaattcaaagattttgttcacatatttaaattcagactggttgatttcaccgcttttatagctttccgataaaataatgcgcagctcttcttcagagtgggcaagctcattttcagacaccgtctccagaccgaacgccttcgttaaaagacgggcggagttgttcagaagccagataaacgggaacatgatgcggtaaaaccaaatgagcggtttcgaaaacagcattgaaacggcttccgctttctggatggcgactgttttcggcgccaattctcccacgaccacgtgtaagaatgtaatgatcgcataggcgagaataaatgaaataatatgcgataatgagcttggtacgtttatctttgtgaaaagcggatgaagcaagcgttcaatcgttgattcgcctaagacaccaagaccgatggaagtcaatgttatgccgagctggcacgccgataaatactcatctaaatgcgtggtcacttttttgacaccgattgcggctttatttccttctgctataagctggtcaacccgtgagcctctgattctgattatcgcaaactcagatgctacgaaaaatgccgtcagcgcgattaaaaccgcgactaaaatcaaattcacaatgtccaattagaaccttcacttcttttgggaagatgaaggtaacacctcctgttagtaagataatggtttaacttaacagcagcataaatgattgaagcactgcaagcttttcaggagccagcctttttttcagctgggcgcgctcctctggttcaagcttttcaaaccgattcaagatcacggagatgttttgattcatgtgatcaatttccgatgccagatttccaatatcgtcaggcagggctgaagagggaaactggttctccagtcgatcttttatatcagacagggccaatcgctgctttttacaagcgactataaactttaaccgattaagtgcaagtgtatcgtagtaacgatagttcgaacaagacctgtcaggctttaaaagcccgaggtttgtgtagtaatccaccgtgcgtttcgttacaccggcaagctctgctaattcactgatgcgataagtctcagccccatctaaatccctccccaaccatcacgttatagttatgagaatagtttaatatatgaaggggagtttgcacaagtttattgttttccgtctttctcctgaaacggcgcggcgggctgtctgaaaaagcgttgactgcgccatgtaaatctttcataatcattgtaaatagaaacggaagaaaaagacagaagggacagatgacagtggccggtttatcacgggaagtgacacagaatctggagaaaggttcatggatacgcaaactatttgatgaaggcgctcggctgaaaaaagagttcggcgccgataaggtatttgacttttcgataggaaatccggttgcggagccgcctgaaacatttaaaaaagcgctttgcgaagcggctgaaacagggcggcacgggtacatacaaaaccaggggcttccggaggcgagagaaaaggttgcgcgctttttgtcagagcggttccagacagaaatttcggccaggcatacagtcatgacggtcggagccggcggggcgctgaatgtcgcgctgaagagcattttaaacccggaggaagaagtcatccttctttcgccttattttgcggaatataaagcgtatgttgaaaattaccgcggcagacccgtcatctgcccgctgactgactcatttgagattgatattgaagcggttaaaggtgcgatcaccccccgtacgaaaggactgatcgttaatacgccgcataatccgacggggactgtgctcagccagaaaaaccttaacgaattaggcgccttattaaaagaagccgaagagcggaacggccaaagcatatttattttatttgatgaaccgtacagccagctgatctacggagaagaacaggcgaatccgtttcaggcgtatcaccgcgtgattttagtcagttcgttcagtaaagatctcggcattgcgggggaaaggctcgggtatatcgcggcagacgcccaaatgcctgagggcgatcttctgacggatgcgttcgttttctgcaaccggacgctcggctttgtgaacgctccggtcatgatgcagcgcaccgtggcgaaaatggatgatctttcgattgatgctgaaccttacagaaagcggagagaccttatggtggacatcctcacagaagccggcttcgaatttgaaatgccgaaaggaggctttttcgtctttccgaaatcaccgattgaagacgaggtggcgttctgcatgcatgccgcacagaaatacaaactattgatcgtacccggcagcggatttggaaaaagcggctatttccgattatctttcagcgtgccttcagaacagatcagacagtcgcgcgatgttttcaaagcactgtatcaagatttttcttcatagcttccaatacaaaaagatgggagaacggacaaatgtcgaggagaaataatggcacgtcagacatcagcattacaggaatcggagtcttaaccgcggtcggacaaggcaaggaggcgcttctcgatgcgctcatggaggggcggcacgcctttgatgtgatgaaacggcccggccggcagaaaggcagttcgtttatcggcgcggagcttagcgaattaacgccgccggacgcgctgtccaagcgcttgtaccgaagggccgcattatcaggaaagacggcacttatcgctctatatgaagcgtggcatgacgcacaattagacggcgctgaccacagccgcaccggtctgatcatcggcggctcgaatatgacgcagcgcgaattgctgcagacctttgagaaaaacggtgaaacgccgcaatttgtaaatccgacatacgggctttcttttatggatagtgatttgtcggggctttgtacggagcaattcgggataaaagggccggcctttacggtcggcggcgcgtcggcaagcggccaggcggcggttatccaggctgctcaaggaatcaaaggtggcctgtttgaccgatgtatcgtgatcggggcgctggccgatctgtcgtacatggagtgtcatgctctccgttctttgggagcgatgggcactgatacatacgctgaacggcctgaagccgcctgccgcccgtttgaccggcatacggacgggtttatattcggagaggcgtgcggggcgattgtgctggaacgggctgaatctgccgaagagaggggcgcacgttcgtgggccggcttaaagggctgggggatggcttccgatgcgaaccgcaacccgaatccttcagcagagggcgaaatgacggtgatccgccaggcgctggagcgggccggtctttcagcaaaagagatcgattacatcaacccgcacggcaccggttcaccgatcggtgataagactgaatgccgggcgctttctgaaagcggcctgtcgcacgcgcggattaatgcgacaaaatcgattaccggacacggtctgagtgcggccggaacggtggaaatcattgctgctctcttgcaaatgcgggaaaacaagcttcatccgatccgaaatttaacggagccgattgacgattcatttcagtgggtgaccgacgggccgagcgcccataccgtacaccatgcgttaagcttaagcatgggattcggggggattaatacggcgctttgtttagaaaatcattttcgaagcagataacggcagccttctttttgaaggctgttttttatatgataaaaaaatctgaaaatgatgaaagaatggagttgtgatacaataaaatatacaaatgacaatcatgctttgacttaggaggtggcaggatggggccctctgtgtagtcaatcacccatttcgttcctctcgcttaagaaaaaacgatgaaatcaggaggtgacgtccttatccttcaattcgggataaggtgaaatggacgatattgacagtttgattttaatcggtgtgctcattgcgttaacggcatttttcgtggcgagtgaatttgcgatcgtcagagtgaggagatccagaatcgatcagctcatctcagaagggaacagacgggcggtgctcgcaaagcgtatcattacggatcttgatgagtatttatccgcctcgcagcttggcattacactcacatccatcgggctcggcgtactgggagagcctgcatttgagcggatgcttcatcctgtgtttcagggcatggggctgccggattctgctgagcatgtgattgcttttgctgcggcgtacggactgattacgtttctacatgtcgtcgtcggtgagcttgcgcctaaaacggttgcgattcaaaaagcggaaaagctgacgttatggattgccggaccgcttcggttattttacgtgttcatgttcccgtttatttgggtgctgaacggctccgcgagaattctgaccggtttggccggattaaagccggcatctgagcatgaaggctcccactctgaagaagagctgcggatcctgctgtcagaaagtttaaaaaacggagaaatcaatccgtctgaatatacgtttgtgaataaaatttttgattttgataatcggatcgccaaggaaatcatgatcccgagaaaagaaatcgcggctgtttccactgatatggacgtgccggaaatgcttgatatgatgctgaaagacaaatatacgcgctggcccgtaacggacggggacaaagacagtgtcatcggcatgatcaatacgaagcatctcttttcagatctgctgtttatgacagaagatgaaaaagcggaagtatccatcacgtcttacgtccgcccggtgattgaagtcatcgagacgatcccgatacacgacctgctgataaaaatgcagagagaacggattcatttggcgatattgtctgatgaatacggcggaacgtccggtcttgtgacgaccgaagacatccttgaagaaatcgtcggcgatatcagagacgaatttgatgaggacgaacagccgcagattcaaaagctgtccgaacgccattatgtgctggacggaaaggttcggattgatcaggtgaatcatcttctcggcgcagggattgaagaggaagtcgacacgatcggcggtcttgtgctgaaacggaatattgacatctgtgcgggtgagtcgatacaaatcgggggatacactgccctcatattagaaatggacggccggtttattaaacagcttgaactcaaagaagaacagggccgcccgggcggtcagggaacaataaaccgccagctgcctgtacctgaaacggtcatgcttcataacgcaaccttgagcgaaaaataagctcaaggttttttaaatggacatgataatgaagccgcaccagaacgccaaaaggcttccggctgctgaaacagcgatgtagagcaggctttcctttatgcggttgttcatcatcagctgcacggcttcaatactgaacgtggaaaaggtcgtaaacgcaccgaaaaagccggtcgcgatgatgatgccggcggaaggattatccaggcccagtccggtgaacatgccgaggccgaaggagccgagcaggttgaccgcagccattccaagcggaatcggaaaactttttgttctttctgaaattgttttacccagcagagaccgtaataccgctccgatacccgctgcgataagcatcaggacaatcgtcatggcgtatcatgcccccttcccgctgcgtgaagggcaatccgccgtccccaaaaaatgccggcgtatgcaagggcaagaccagcgaataaagtcgcggcagcataacaaaaagccgctgcgggagacgattgcagcagaaaaatggtttcttttgcgaaggttgacatcgtcgtgaaacctccgcaaaaaccggttcctaaaaaggcggtcaaaagagggcgtttagcccgaatgatgaaataacccgtaataagaccgagtaaaaggcttcccgccgcgttttcgaggaaagtggccgccgggaaagaaccgctgtgaatgtgcgcgctcatttcaaagcggagcaaagcgccaagcgcgcctccgataaaaattgcgatgtattgtttcatatcagccatccttagaaataaaatccggaaaatcagttacaatgccgtcaactgccatcatttgcagcttttcggcggtcttttgatttctgaccgtccaagcaaatactttcaggccgtgtctgtgagcggtggaaatcaagaaccgattcagacgggtatatttaatattgacataatgtacggctgatttgtaggcggccagctggcttttggaaaacatcccaaagctgggtcttgcaataattgcagtcggaacggacggatacatgccgtgaaaggtctgaatcgacttgaggctgaatgattgaacgatagggtggatggaaaaggaaaacctgcttaacagctggccgactgctttttcaaggccgacttgagaaacgtgccccttcagttcaattaaaaatccgatttcagaatgataacgcttcagaacctcttcgagcaggggaatccgctcccctttaaactcagccccataccagctgccggcatccagggactgcagcttcttcagcgtaaaatcttttacaaaaccggagccgtccgtcgtccggtcgactttgtcatcatggatgacgacaatctgaccgtcttttgtgagctggacgtcaagctcaatgaaatcagcgttcatttcggcagcgatatcaaatgccgcaaatgtattttcgggcgcgtaaccggatgcgccgcgatgagcgatggtatacaagcttgtcagctcccctcatgggcatttctgttattatatcagattcgtatatgcacagcgattcaaactggtgaatgtgcaaaacagtatttttttggaataaagttagtgcttttttcggtttacaatccgcattgatgatttataatggcaaaaaggaggcgagatcatgggaaaagggagattgaaagtggaagaaagaattaaggccgaaaccgatgctgaaatccaaaaagcgactctcctgaaacagacacaatcaaagaagaaatagtgcctgaccctgttgtatctggctgaaagatgaacgaatgtgtgaaaaccccggctatgctctgatgccggggtttttcaggctgcctaaagacattaaaagaagctgatgtccgaatgttttagtataatagattttcgacaagacaaaggagcatgccatgatgacacaatttcagagcttttttacgcttgaccatatttcgcagatcagtatcagcatcggaattttagcggcttttctcgttttgagaaaactgtttgtcaaatacttttttcagctcatttacaaattggcgaacaagccgaaaaccgacatattcaagcagattgccgtagcgtttgacaagccggccagatggtttttcgcggcgctgggtctgtttttggcgattgagtattcgccgtttttagacgggcagatggacattgtcaaaaaattgtaccgctctctgatcgttgcgctgatcgcctgggggctttgcaatctgacatcggcgtcttcgtttttatttcataaagtcaatcagcgctttgagcttgatatggatgacattttggcgccgtttttatccaaggtgctgcgctttgtcattctcgcgctcagcgtcagtgtgatcgcgcaggaattcaattatgatgtaaacgggttcgtggccggactcggacttggcggattggccttcgcgcttgcggctaaagatacgatcagcaattttttcggcggcattatcatcattacggaaaagccgtttacgatcggcgactgggtcgagacgtcatctgtgacggggggcgtcgaagatatcacattccgaagcacaaggttccggacggcgcagggggcgcttgttaccgtgcccaattcaacgctgtccatggaagccatcacaaactggacgaggatgacgaagcgccaggtcacgttttccgttcgtgtttcttatgcgacgccgattgatcgtctagagcggtgcatcacaaggctcagagaaatgcttcgtgaacatgaaggcgtgcatgatgatacgattatggttaactttgacgtgtttgcggacagctattacaatctgtttttcaacttttacacaaagaccatcgtctgggcggaaagcctggacgtgcggcaggatatcaaccgccggattattgatatttttgctgaggaaggcgtggagttcgcctatccgggccagaatgtattcgtaaaacagaaaagccacgatgatccggttcatgtgaaggatcattccggagaaaaagaacgggcataacaggcgccgttcttttttcatgatatgataaaaagaaaaggcggtggaagagtggaagcgtttatgacattgatcaatcaggcggaacgtatcgtggtgctgacgggagcgggaatgagcacggaatccggcattcctgattttcgttcggcgggcggtatatggaccgaagacacctccagaatggaagcgatgagcagggaatactttgaacgccgtccgcgtgaattctggcctaaattcaaacagctctttcagatgaaaatgagcggaagttatgagccgaatgccggccatacgtatttggcggatcttgaaaagcggggaaagcaggtagacattttcacgcagaatattgacgggctgcataagaaagcgggaagcagcagtgtctatgagcttcacggttcaattcagaccgccgcatgcccccgctgcggagcgcgctacgggctttctcatctgctgaaggacgaagtgccggaatgtacggcggaaatcggtgatcatgcggtatgcggcaccgtattaaaaacggatgtcgtgctgttcggcgatctcgttcagcattttgaaaccctttatgaaaagcttgataaagctgatcttcttcttgtgatcggcacttcgcttgaagtggcgccggcaaggtttgtccctgaggatgcgggccggattcccggtttgaagcaggtgattattaaccttgagccgacatattgcgaccatttatttgaccttgtcatccatgagaagatcggtgaatttgcaaaacgaatcagcgccgcgacataaaaaagccggatcatatacagatccggcttttcttattcatggacgggaatcatttgatccgtcagaacatcaaaggagtagccctgggctttcagtttttggatcaggctaggcaaagcgtgcaccgtcgcaggcagatcgtgcattaaaatgacatgcggcctgctcgtatgaacgctttccaaatatgcgagctgattcaatacttccggcacgtaccgtgcgtttttgtacttccagtcttcactgtctatcgtccagtcccagtacacgaatccgcctttttcgagattcttaatctgggcatccgtcaatgacggtttactgccgtaaggcgtgcggacaagatccgtttttactccggtgattgcctcgagtgtatcgcgtccctgctgcatttcgttcagcggtgatatcggtgtttgataaaacaggtgattatcgtgcgtcacgccgtgcaggccgagcgcgattccttcctgcttcgctctttgcacggaatgctgataggctttcatccgcggttcaagcataaaaaaagtggcctttgcgccatttgccttcaatacattcaacagctgttcagtatatggagacggcccgtcgtcgaaggttaaatataccgtttttttccctgggtcacgctctctctgcaaatgtttcattaagacgtcgggagaatcatttttcagccgcaggctttctgcttcatcccgaagctgcccgtttgcagtcacggtgacctgtttgttttttgcggcggaagcggaatatcccattatgacgattaccagaagcagtccgcacaaaactgctaaactcgtaagtttaaaagccaatgaaaacagagaaggggaagcaccttcttttgtgttgcgcataacaatctctccagtagcataagtttctgcataatgccgataacagcggaggcttgcgaagtgccataagttaacagcatatgtatgtcgaatcaagtatacaggaacaaaactggaaaagacatagaaaaggtgtcgaataataagattttaagaaaaaaataaactccgcagccggctcgttcagtatgatagaatagttgacaataacagctgagaatgcacatcacggcagataacgatgaggagggtttacatgaagacattagtaaacggccagttgattgatcgtgaagaagcggcagttgatattgaggaccgcggatatcaattcggtgacggtgtgtatgaggtcatcagagtgtataacggcgccttattcggtctgcgcgagcatattgaccgtcttttcagaagcgcctcagaaatcggcatcaccctgccgttctccgcagaggacatagaatgggatctgcaaaagctcgtacaggaaaacaaactcattgacggcggggtctatatacagacgacgagagggaaggcgccgcggaagcaccagtatgacgaaggattggaaccgcagacgacggcatacaccttttcagtgaaaaaaccggaaaatgaacaaaaagccggagcgcaggccataacggcggaagacaaacgctggctgaggtgtgacattaagagtctgaatttactgtataatgtgatgattaaacaaaaagcctatgaagcaggcgcttatgaagcggtgctgataagggacggagctgtcacggaaggaacctcttccaatgtatacgccgtcataaacggcactgtccggacgcatcctgcaaatgagctgattttaaacggcattacgcggatgaaactgttagagctgatgaaagaaaacgggattgaggtgcgtgagcaggctcttaccgaagacgaactcagggatgcggatgaaattttcatctcgtcaacgacggctgaattaatcccgatcgtaacccttgacggaaaaccggtcggaagcggagcgccgggacctgtagccaaaacgattcaggaggcttttcagtcgcacattcagcaggagctcggcgttcagtcataagctgaaaaaaggccggaacacatccggcctttttgcttcagtcagataaaaagagattcgatatgctgaacgagcacacgggagatcttctcttttgaaagacgatcaggttcaagcatggcatgcagcgccaatccgtcggcgatggcatacattttctccgcttcgatctctttatcaagattcggtttcagaagcttattttcatccagccagtcaatcaggccgcggatatatgccaagatcccgtcctgctggggatgaaactcttctcccttatgtctggcataagctgtgaaagcgaaccatacctccatttcagccatcgtttcttcatctgtcgggatgatttcaagcatcagacgcaccgctttttctttcggcggcagatctttcatggcaacttcgttaattctggcggccgctttttcttttacgagtgtcatcgcataccctaaaagctcatcctgggtggtgaaatagtgcctcagcgcgcctaaagaaagacccgcttcctgggcgatgtttctcactgtcgctccttccattccccgctccaaaatcgtccgccaagtggcttcggctatttgttttcttcttttttcatgatcgattattttaggcatggttccagtgtaacaggaaatattttttcttgcaattttgtaatacagttgtattaaataaagagcagtgatacaatgcattttagaaaacgataagggggaaccggattgaacgcgattgcttggttgattgtcatttgtgaggctgctttttgggcggctgtcatctttggattggcggcgcgctatatattcaggcggcaaaagctcggaatgttttttttcgctctcattcctttattggatgccgtactgtttctggcggctgcagctgatttatacagaggggcggcggcgactatggcgcatgcggtggcggccatttatatcggagtgtctgtcgccttcggaaaaagcatgattcaatgggcggatgagcgattccgctattatgtggtcaaggaaggggcaaaaccggtcaaacggtacggactggattatgccaaacattatgcgaaagggtggggaagacatgtattagcatttatcatcggcggcgttcttttagccggaacggtatttctcattcaggacgcttcccgcaccgaagcgctcagcgtactgttaaagggctggtctgtcgtattgtgcatcgattttttgatcatggcgagtttttttgtgatgccgaaaaaaagaagaaacagccgggagctgtaaaaaaagcagcttttgattaagctgctttacagaaagaattattttacgatcagcacgggaatatcggatttcgatgacagtttttcactgacacttccgaataaaagttttttcagtctgttctggtcccggctccccatgacgatcaaatccgccgatatacggtcggcatgctcgataatggcatcagcgggatcaccttctaaaatgtcgatatccccgtcaatctggctgtcgttcatcagcattctcgcttccgcaacgatttcttccgtacggtcttcataaatcatcggatcaggggagattctttccgcctggagcgggtcaggaacgcttgcaatcccgccgccgatatacgttgccccggctcccggcctcgggggatcaacaatcgtccgggtatcttttgcattgtgggaatgtacgaccgttaaatccgcgtgaaacgtttttgaaaggtctatggctttttggagcgcttttttactatcatcacttccgtcaaaagctgctatcaaccggtccgcgtgaaacatcggcctcatcctttcagtaaaaaaggtttgttttacaatacccgaatggcagaaatgtaaaacctgcgttgacaaaaaaaggatttgtttatatgatgaaggaacaatatagggaaaaaggaggtatggatcatgtcaaaactaaagcttgtcaactcatcttcagctgaataccggcgtgactcccatacagcttccgttttctgaacatttgcttaaaaacgaggcagtcgcgcataaacggcgggtctgtaccttatttataataataagaggcatggagctgaggcttcatgtctttttttatacaaaaaaatgaaagaaagacaggtgtgatgcatgtggcggtattagcgaaaacaatgaaaaacaatccggaaaagcttgagggcggctgattgatgaaaggggatgacggtatttgtttactgtattaaaaaagctcgcgtggttttttaaagcctattggctgcgctatacgacagcgattgttctgttattgattgtgaatgtcattgaaatgtttccgcctaaacttctcggtaacgcgatagacgatatgaaggcgggcgtgtttacaaaaagcgggatgctgttttacatatgtgtttttctcgcattaacggcagccgtctatttactgtcttatttttggatgtatcagcttttcggcggggcgaatgtcatggagaagattctccgttcaaagctgatgggaaggcttcttcaaatgtcaccgccgttttacgagaaatacagaacgggcgatttaatggcgcgggggacaaatgacttgcaggccgtcagtatgacgacgggcttcggggtcttaacgctcgttgattcgacgatgtatatgctgacgatatttttgacaatggggcttctcatcagctggaagctgacatttgccgcgattattccgctgccgataatggcggctgcggtcagcctgtacggaaaaaagatccatgagcggtttacggaagcgcaggatgctttcggatcattaaatgacaaggtgctggagtcggtatccggcgtccgggtcatccgggctttcgtacaggaaaaaaatgatgtcagccggttcggtgatatgacggcggatgtatatgagaaaaatatgaaggtggcgtttatcgattcactttttgaaccgactgtgaaacttctcgtcggcctcagctatctcatcggtctcggctacggcgcttatctcgtttttcaaaaccggctgacgctgggagagctggtatcgtttaacgtgtacctcggaatgatgatctggccgatgtttgcgatcggagaattaatcaatatcatgcagcgcggaaatgcttccttggatcgtgtgaatgagacgctttcctatgagcctgacgtgacggcaccaaagcaccccgccggcatcaaggagcccgggcgtcttgtttttgaacaagtgactttcacgtatccgagcggagcgggaccggcggtttctgatgtatctttttccgttgaaaaagggcagacactcggcatcgtcgggaagacgggaagcggaaagacgacgatcattaagcagctgttgcgtgaatatccgcccggggcgggtgcaatcacgtttacaggcgtaccgattcaggagattccgctcgaggagctccgcgggtggatcggctatgtgccgcaggatcatattttattttcaaagactgtaaaagagaatctgctttacggacggcaggatgcaaacgaagaggaaatcggcagcgcgctgaaagatgcgcattttgaaaacgatatcggtatgctttccgacgggcttgagacgcttgtcggcgagaagggcgtagcgctctctggcggacaaaagcagcgcatctcaattgcgagagcgcttttgactgatcctgacattctcatattagatgattcgctttctgccgtagacgcgaaaacggaagccgccatcattgacagcatccgtaaaaaacggcggcataaaacaacgattatcaccacccaccggctctcggcagttgaacacgcagatctcattctcgtcatggatgaaggccgggtgtctgaaagaggcacgcaccgggagctattggcgcagaacggctggtatcgaaaacaatatgagaggcagcagctgtcctctcttgaagaaggggggacgggcgcatgaagaccggaagaagattatggaattacgcgcttcaatataagaagctgctgatatgggcggtcgtcctgctcattattgcggtcggcactgagctgaccggcccgtttatcggaaaaaaaatgattgacgaccacattctcggcattgaaaaaacatgggttaaagcctctgcggacgatccgggcgccgtcaggttccgggggcatgattatgtcagggaggaccggctcaaaccgggggcggacaaaaccggagaggcgcacatttatcaagtcggtgcgggctactattttgttgaccgtcccgtcagttttgacggaaaccgttcggtgtctgacggccggctgacgatatcaaacggtaaagaaagcaggtcatatcccgccattacgttatcaagacaggagatttttcaattttaccgtccggaaataaaaggattgctgacgctgaccgccatttacgcgggactgctcatgttttccgtatgttttcattacggccagcattatctgctgcagatgggagcgaaccggatcatacagcgcatgaggcaggatgtattttcacacattcagaaaatgccgatccgctactttgataatctgcctgccggaaaagtcgtggcccgcattacgaatgacacagaagcggtcagggatttatatgtaacggtgctgtcgacatttatcacaagcggcgtttatatgctcggcatttttacggcgctgtttatgcttgacgtcaggctggccgccgtttgcctgctgattattccgattttaatgatctggtcggttgtctaccgcaaatacgcatccgtcttcaaccaaaaaatccgttccattaacagtgacatcaatgcgaaaatgaacgagtccattcaagggatgccgattattcaggcgttccgccgagagaaggaaacgatgaaggaatttgaagaattgaatgaagctcatttccgctacaaaaacaaaatgctgtccttaaattccctcatgtcccacagtcttgtcaatgtgttgcgcaatctggcgtttgtcgggctgatctggtatttcgggggcgcgagtctgagtgcggccggaattgtttcaatcggtgttttatatgcatttgttgattatttaaaccgtttgttccagccggttacggggattgtcaaccaattttcaaagcttgaattggcccgtgtctctgccgccagggtattcgagcttttacaggaggaggaaacggaagaagaaggcgctcccgcagacagaaaggcgaaaggaactgtggaattccgcgatgtttcttttggatatcgaaagggagaagaggtgctgaaacacatcagctttacagctgaaaaaggggagacggtcgccctcgtcggccatacggggtccggcaaaagctccatcctgaatcttctgttccgtttttatgatgctcaaaaaggggatattctgctggatggtcagagcatatacggcatgtcaaggcaggagctgaggtcgcatatgggcattgtgctgcaagacccgtatcttttctcgggcacgatcggctccaatgtgacgctcgatgatcagcgtatttctctggagcaggcggaagaagcgcttcgccaagtcggtgccgcaagtcttctgcaatctttgccgaagggcatcagagagcccgtcaccgaaaaaggcggcaccctgtcctcaggccagcgtcagctgatttcttttgcaagagcgcttgtgttcgatccggccattttaattttggatgaggcgacggcgcacattgacaccgaaacagaagcagtcattcaaaaagcgctgcaagtggttcaagaagggcgcacgacatttattatcgcccatcggctttccacgatcagacacgccgaccagattctcgtgctggaaaagggccgcatcattgaaaagggaagccatgacgaattaatggcgcaaaaggggcagtaccgccaaatgtatgaattgcagaaaggaacggcgaagtccgcggtgtaatcggaaagggtgaatctaaaggttcgccctttttttcattcagtaagccagtcccacccgttttctgacaaactgagggctgatcagctcacggtacagaaaatgcgccgtgtctccgacggtgatttcagcgccgtcttcaggaaggcgatcctgttcgaaccggtaaactccggcagcatctccgtcaggaaggtaggtgggacagatgatcgtccagtcaagatcctctgccagcagcatctcgtatacgcgggcgtgttcctttgcggctcttgttgattttcgttttgattctgccgattcaaaacggtattgatcaggcataagccgtgattgaaggatacccgcggtgccgatcgtaatcagacgctgaacacgatgccgtttcatgctgtctattatatgggttatagcggctgaaagggtatcgtcaccgtccgtgccgagacagctcacgactgtgtccgctttggaaatcaatcggcttacatcttcccgccgcctcgcattccctgttatgatttgtttttcaggaatgggaaggactgtaccggctgatctgacaagagcgaatatctccatgtgtccatgtttctgcgcttcttttataaaagcctgtccgactcttcccgttgctccgagtaaagcgatgttcatgtaaaaaacctcctcgccgctcattatatcattcaaagcagcggggaaaagaatacctgtgaataaacgggaaatggtgggcaacatattcattgaccaaagaaacacttacgaactgaaacagctcccaattgactgaggcaatgaatgacatgttttccctccttttttcctagggtatgtggaataggaaaaaagggtgacggcataaaagaagacgcggtatcccgcgccttctgtaagccatttattgagttgttattgtacgccttggccgcccatgttctgctgtgcgaaagatactagacgtttagtgatttctcctccgacagaaccgtttgcacgagaagttgtttctccgccaaggtttacgccgaactcagaagcaatttcgtatttcatttggtcgattgcttgagcagcgccgggtactaatagttggtttgaagagttgttgtttgccatttgtatgatctcctttattaagtagtatggttgggtttgctggaattgcaccagccgatggttttcggaatgaaaaccattgccagctcggcttcacccaatgctgtttgccgctttgtactacgtattatggtgaatcaaacggcatctcattcggaaaacggtgtggtaaatagcggaaggaaaaaagaaaagcccagcctggtgcggctgagcttttagctttcagtcatatatgtgataaagcattaattcatgcagctcttttacgagagccggctcttcttttcccggatgtgtgtgtccccattcaatgtctccggacttatggtaaatcccttcataatgcgtaccctgccagtaaaatgaaatccgccatccgggcagtttctcttttttgaataacggtttccagctgaagtgcgaaatcatgacgttcacgctccttatgggaaatgttgatcttgttcattgtagctcatcgttcattgcctgtcccgggtaaaccaaaaaaagacagcctcaccgccaaagtttttccggggcggtgatggaccgttctgataaatacgacgcgtattcaaaatttctccgttttgtcaggtaatcgaccgatctcagcttcggatgggaaaaaatgctgcgcccggggcgggaattggcttcaaacatccaaactttccctgaatgatcgacgccgaggtcaaaaccgatttcgccgataaaaccttcaatgtgctcatttaacacgcggctgaccgccaaggcggcttttgaaagtttccgcatcatgccgactctctcgcgcggatcgccgtataattcagctaacgtcctgacttctccaccggttgccagatgcgtcgtgatgctgttttcaccggaaatttttgccgcaatggccgtcactgtccatttcccctcggcgtttttattcgtgtgcaccctgaaatcgacggggcgcccatccagccggatcaggtcaatgccttgctgaattaaaaatgcggacgggtcattgttttctttaaatgctgtcatgaaggatgccgcatctgaatactctgccgtcaccaccgttttttcctcattcgtgtgtttgacagataagccggcatctgttttttccaccttgtaaatccccgttccgagtgcaccgtctgcaggtttgatatagacggtgccaaatgtgctgcataacgtctctaacgcttccgcattcgggtgcaggacagattttggcagaagtgaagcggtgagactgtttttttccagaagcttatgaatgtcccatttattaaagaattgcggattaaaccacggaatctgatagtcattcatcagcctctgttttgtctgctgtaaaagcggaacttcttccgtttttcggctcgggagcctgtcatatacgacattcggaagcgggacggccgtccgtttccagctgttttctttataaatcagcgcttggacggtgccttcttcccagttgatctgatgggccccgaaaacgaaacaatatccgttcgcctgttcatgaagagagagcatcttggaaaagaaggctgtacggtctcttaacgggcgggacggcgatgatgtgaacccagctgtgaaaacgccgatcagcggtccgatgtgcaccgtctggccgtgtatgagaaagtcagcccggcttttatgcggtatcaacagctcctcaaacaaatcttcagaaaggagcgcgcttttttcaagtgattgagaaaaggctacacggcatttgacaaccttggtcccgaaggcagcggataaaagcccttcccgtttcatggaggaggggagaaacagcgtatttttgctttttttatcgatgccgacaatcatccctttatgattcacgcggtaatacccctttccggctttcctgtgactgaagctcacggaagcgtctcagcggactcgtatacaaatcctctttcgcctccggagccacgcttaaaatagcttttcgtcccggctttgagttgacatccaaaagccagatgcgtccgtctttggcataacaaatatcgagccccagctcaaacagcggcccgaaccgttcgtcaaggaaataagggacggattgggtgatcgaaaagacatcatccaataaaacggcctgctgctttctcggaatttcctcaaaccatgtgtcaaacttaatcggttctgatcctccgggcaaatgagataaaagaccgttctgatagccccttctgaccgcttttccgaccgtttcccaaacgcctgactcagttttacgcatgaaaatgcggatgtcgcacggatgccgctctttatcctggatatttaagtaggattgaagcaaatagcggtgctgcagcacttttttgcaccaagacttaaaagacacgtgattggaaaatgattttgtttgtttgttttttccgatatagtaagtggccgtaattgattttttgcctgtttcaagcaggatgatgcctctgcctcccgcgccgaaagcgggcttaagtatacatgctttttccttggctaagtatgattgcacctgttcatagcggctgacttcggccgtttcaggaatatagggactgatcagatgatgcttttggagcgcatccgtgatcgtccatttatcaggaagcccccggccgataaattccgttttcggatattttttcagccattcgacgatcggtttggctttttgcgcttcagcggattttccgtaaaaacagcggtcgtaaatatattcgggaatatcgatttccgtttcgttccactttccgctttgcgggtgatagacgagcgctttcacgcgcaaagaatccggaaatatatcaaacggtgtaaagcgggctaagcgcacattatattgaggcgctctttcagccaattccccggcgtaatcttcttcgtgccggcgggatacagacataaaaccgagtgttgtcatattattactccccctttattcaaaaagccgctgatggaacggcccttccatccaataaatatgctaagcgcatcataaaagatgatctactgtaaagagtacgaaacagcatcttgccttattcctcacaaacaacaattcaggttcttcatttgcccgcatgcccgccagcctctataatacgaatagatatatcatcaagaaaatagaacataagatggaggcagaagaaaaggaatgggcatagcaggaacgtttctatttatgattgtgatcggagccgcgatcggtgcggtgacgaatcatcttgccattcagatgttatttcgtccgtaccggccgtattacctgttcggaaaacgggttccgtttacgccggggctgatcccgaaaagacgggatgaattggcaaaacaaatggggctcatggtgacgaaccaccttttaaccccggaaggaataaaaaagcggcttttatcagataccgttaaaaaccaggcgcttcttttcgccgaacaattcacgcaaaaaatggccgcttccgagatgacggtgcacgaagctttggccgccgcgggcatcgggaatccgcaggaaaagacggatgcctggattgaccgttttaccgatgaaaagctttcggaactgtaccggaaatatgagcaccgcgccataaaagactggcttcctgatgagcttcaggaaaagctggatgaaaaagtcccgctggccgcagattatattctgaagcggagcattgattattttgagagcgaagaagggaaagaaaggctcggaaatatgattgacgactttttgaattcccgggggatgctcggcagcatggtgcagatgttcctcggcaattcaagcttggcagaccgtgtgctgcctgagctgttaaagtttttgcgcaatgaggaaacgaaaaagcttctggctgatctgctttctcaagaatggggcaagctcaaatcttatacactttatgaggccgatgaaaagtggaatgcgaaagatctgctgttcagcatgaaaaagcgggctttggccgcacttcaaaccgcgccctttttcgaatgccggctcggtgacatcatctcccgttatgaaggggagattacgggaacgtacgcgccgaagctgcttgatgcggcactcggcagtattgccgctcatttggaggatgtgctgaaacggctgcgtcttgaggaagtggtcaaagagcaggttgatcagtttcccgttgaacggctggaggaaatggtgctgtcgatttccaagagagaatttaagatgataacgtatttaggcggtctgctcggcgggataatcggagcaattcaggctttgtttgtcattcttttctaaggaaaacatacgccgatgatgaaagtcgctccgcagtctgttatagtggagtggtatgtccgaaaggaagaaaggagcggttattatggcagttcatttttatgatgcagcatatgatcttgaaaaagctttgcgaaacagtgatgaatacagccgtctgagagggctttatgatcaagtaaacgcagatgaatccgcaaaacgcatgtttgataacttccgcaatgtacagctgcagcttcagcagaaacagatgtcaggtgaagaaatcactcaggaagaggtagagcaggcacaaaaaacggttgctctcgtacagcagcatgaattgatttctcagctgatggaagcggaacagcgcatgagcatgctgatcggcgagttaaacaaaatcattatgaaacctcttgaagagctttacggcagcccggaataagctccacacccctccatctatgaaatggaggggtttttttattcaacagaaaaatcaagcgaaccttttaccgttccgttaatgatgacagacagagtgtgaattccccgataatgcttgcgggtggttaaatctttaagggaatgatgtttgctgaaggcttttacgtctccgttatccatggcggactccgacatcttaaacaccttgcggctgcggtgcccccttttctttacaaaatcaatcgcgtattcaaccctgactttttgccgggcggatgagcggatctgaaaagaaaaatgtatgcttgttccgatggcggccgtttccgaattcagtgtaaaacgttccaatgaaatccgggtggcgtcttcaaacccgaaaaccgcaagtgcctgtttgtctcctctttttaacagtgtcctgcaggcgtgcttcaaaatccagtccgtgtgcggacagcttccgaaccgctcggctgcgatctgtaccagaagatccggatgtgttttggagatgtcattcaggttattcgccacgctttttctgacatataacgagtcatcctgcatcaagcggtccagaacagggagaatcggggaaggatcgtcaagaagagccggaatggagattccccacggcaggcgcggtcttgagccttcgctggcaagccttctgacatgttcgtccggatgctccgtccaggaaaggaactctttgaacatccgctcccggtcaagcctgatatacgggcggaccgcaaattcggaagtggaaaaacgagtgaaatactgaagcgccttcattgattcgtcccagtgatccgttccgtactgttggacataatcgggaaaaataatcccggcgagccctgagaagcggggagctgtctcatataagacgtcaagcgcccgtatgtaatccttcggcagtgtttcatataaagagtctgtgatccggcgcatccgctgttttaacgtcagtccgggccaatcttcctgaaacatcagcgcccggcacttgtcccgctcaaaagccggatacgccgatttgattctgttcagaagtgcttctgcaaattcttcgttataaatatcttttaatagagacatgacagtcaccgctttttttcttttattatatgagaatgtatgttccctttcaactttatcatacattcagcatagatatttcctctgatttttttagttaaaaaaacccttgttttttaataatataattgagataataactctgaaagcgcctacacttacagatgatctaaggatacggtcgcctatactgcctggtatgttaaggggtagcaacagagagtaagtgaaacgagcgcatcaacggtcaaataaggggttcctgatatatttcgtaaatagaaatacacattggggagaaggcagcaaatcgatcgtatcccaacaaaacgacagttcaaagtctgcttgaggcaggcttttttgctgcggagaaaaggttgttctaaacaaagagacagggtcatatcctaatgacaagtacagtcatcaaggagggggacttctctgtgtcaaaacaaatgctggcgttaaatatagacggagcgcttcttcgctccaacggcaaacttcatcagacgacaaaggatgccatcgaatacgtcaagaaaaaaggaatttacgtcacactggtcacaaaccgccattttcgctccgctcaaaaagtggcgaaaatattaaagctgaatgcgaaattgattacccacagcggcgcatacatttctgaaaaaatagatgagccgttttttgaaaagaaaatatcagaagatcacacgtttaatattgttcaggtgctggaaagctatccatgcaatatccggcttcttcacgaaaaatattcgatcggaaacaagaagaaagtgaactccaatctggtcgggaaaacgatgattcatccgtctgacccgattttttatccggtgcagtttgtcgaatcattaagtgacctgctccttgatgagccggtttcagcgcccgtcattgaagtgcatgccgaagatggcctgcaggctgatataacggatacgataatgaaagcattcccggccgtcgatgtgatccgcgtcaacggagaaaaactgaacatcgtgcctaaaggggtttcaaaagaaagcggactttcgatggtcgccgctgatctcgggctttcaatggaagaggttgtggctatcggccatcaggaagatgatctgccgatgatcgagctggccggtctcggcgtcgcgatggggaatgcctcaaatgaattaaaaagaaaagcggactgggtgacaaggtcaaatgatgaacagggagtcgcctatatgattaaggaatatttccgcatgcagcaccgcaaaggctttctcgataagttccatatgaaacggccgtaatcagagccgcagacgcgaaccgccggtctgcggctttttcgcggattgattttagcctgttctttctgtacactaaagaaagttttgaatctgaaaaataaggtgatcacattgcaaataaaaatagacggcatcacggatgacaggctgcatcgtccgctgcaaaacatcgcgaatttgttttttgaagagtgtgttcttgcgtacggcgaaacggaggagccctctgatctcgtcatctcacttgccatttctcaagatgcagacagcgtgtcggtatccggagaaatcaaaggaaccggcgaaaaggaacatcatacgaaaccgcttcttgccggatggagcgaaaaagaagtatttaaacaggtgaaaaacacgctgtcgtacgtctacttaaatcttcttcaatcgcatacgggcatgacacaaaaatggggcatcttaaccggcatcaggcctactaaacttcttcataaaaagctgcagagcggcctgacaaaagaagaggcgcacgccgatctgaaaaaagattatctgatccatgatgaaaaaatcaatctgatgcaggagatcgtcgaccgtcagctcgctgcggttcccgatctgtaccgggtcaaagatgaagtcagcatatatatcggcatcccgttctgcccgacaaaatgcgcctactgcacgtttccggcttatgccattcaaggacaggcgggaagagtcggctcctttttatgggggcttcactatgaaatgcagaaaatcggagaatggctgaagcggcatgatatcaaagtgacgaccatttatttcggcggcggcacgccgacaagcattaccgctgaggaaatggatcttttatatgaagaaatggtccgctctttcccggatgtcgcgaatatcagggagattaccgttgaagcgggccgtcccgacacgattacggaggaaaagctggccgttttaaataagtataagattgacagaatcagcattaacccgcaatcttatgaaaacgaaacgcttaaggccatcggcagacaccatacagttgaagaaaccatcgaaaaatatcatctttcccgcaaacacggcatgaataacatcaacatggacctgatcatcggcctgccgggagaagggacggctgagttcaggcacagtcttgaggaaacggaaaagctgatgcctgaatctttgaccgttcatacgctttcttttaaacgggcgtcagaaatgacgagaaacaagcataagtataaagttgccgacagacaggaagtgtcccgcatgatggatgacgccgtccgctggacaaaagagcacggctatacgccgtactacttgtaccggcagaaaaacattctcggaaaccttgaaaatgtcggctactccttccctggtcaggaaagcatctacaacattatgattatggaagaagtgcagacgattatcggtatcggctgcggcgcggcaagcaaattcattcatccggaaaccggaaaaatcacgcacttcgccaatccgaaagatccgaaatcatataatgaccgattcgagcattatacagaagagaaaatcaaatacttagatgagatgttcgtcaaatctgcattataatatcaaaaacggcacggaatcagcgtgccgttttttttatgtttaaccgtctgcaaaaacgggaaaagaccatcagactgttattcgtaagaggtgtaattatgtatgatgtcataggagcgggaatcgggccgtttaatttagggcttgccgcattgttagaggatatacccggaacagacgctctttttttcgataaaaagaaagaatttgcgtggcatcccggtctattaattaaagggacggatttacaggtggcgtttctggcggacctggtcacgctcgccgatccgaaaagccgctacacgtttttaaactttctccatgaacatgaccggctgtaccggttttatacgtttaatgaatttgatattccgagacgggaatttaacgactatttgagctgggcggcttcagaaatcaaatcatgccgtttcggctcagaggtaatcggtgtgaaaaatgccggcggacattatgacgtcagcgtcaagaacattgaggacggaagcatcagtgtctatcaaacgaagcatttcgtcatggggacggggtctgagccgcttattcccgcagagattgctgacgaagcgcgtcaggacacgatggtcagcacggaatatttgtttcggaaagacgagctcgccggcgccgaatcaattacagtggtcggctccggacagagcgccgcggagatcttttctgacttattgcacgatgaacaataccgccgcagccggctgcaatggg

SEQ ID NO: 49 - DNA, 76168 bp, Bacillus amyloliquefaciens
gggtgcagcggctgcaccgataggcggccgtctggctgatcgcggcttgacccggcttgccaccggaatcgctctcggtgttgtcatcatttctttattactcccgctcataattcagagcagctcccccgtcggaatagcagttctggtggccgcagctatcctgttggatatgggggtatctgccaatctcgtactcagtcagcgtgccattttttcgttggcacctgaatttcgcagccgattaaacggattatttatggcaatcttctttctgggcggtgctataggatcatcaatcggaggatgggcatacgcctcaggcgggtggagtatcacattatggattggaatcgcttttccggtcatagcattgctttatttcaccacggagaaataagcctttccccaaaaataagccgtcaggaccaagctgacagctttttttggtgtattcttctttacatccatccgaacaaaaaatccggattcatgaaaagataatattgattctttacgccccgctcatatagccggacttccaattctttcagcagcggtaaaaccatgtcataatatgttaagaaataattgcgccataggcaggtgaacacatgaagaagtatttatataaacaccttttgttagctttcgtttcgtccgtttgctttttattagtcttttacgtgagtttaaaaatgacacaagaggacacaccgccgttgtcttcttacccgttttacctttttatttatctgtacatagcagccggatatttgacggtcggccttgttttagcttgtatgactgatatcttgaagaaccgctggacattcaataaaccgtctaccattctattgaaacttatcgtttacttactcataccatatgctatttttcattctttcttcattttaatggcgccgttgatttatgtgctgtttgagtcgttattcatcctgagaaaagcttcataacctgaaaaaacataccgcatgctgccggtatgtttttaatatgcttgtcagttgttcgcagtgatccgtttgatgttttcttccatcaagccggaaatgagctgttcgtttgtatgaggaatctgtttgagctgttgtacgaccagcccttgtcttgcagctgaatgattttgactcagctttgctttcccctctattttgctgactttgattttaaagccttttacccctttgttcatgcctgccagcaatttcgcatcgacatcctctaatttgtacgggctatcggggctttcgtatttcaatacgagatcactcatcgactgcacggtttcttcctcatccaaaagctccgcctctccgtaaacatgaaccgccacataattccaagtgggtacagcctgattcgtctcataccatttaggcgagatataacaatgaggcccttgaaaaacggctaacacgttttggccatcaatctctttccattgggggttcggcaatgcaaaatgaccgtataagcattcgttattcttactcatcatcaatggcaggtgggtcgcatacggcatgccttccgctgttgaaaacaatgctgcgaaaccatactctttgattacatcgcacgcttcagcttcactcagctgaaatggagcgggaatatacatacaaaactctcctctctgaacatggattgataaagcgctttccgctataataagatatcaactgacatttaaaaaggtacagttttgaataaatatacatgtcagaggagaacatctgatgaaaaatatgattttcgctttcggaagcgacaccccgaaatacaaacaaatttacgagcaatttaaaacattgattgagcagggaaatattcaggcagatgagcggctgccttcgattcgggaactggcagattccctgcgggtaagccgtaatacaacgctgatggcttatgatcttcttttagcggagggatacattcgcggagaaacacgcaaaggttattttgtaaatgaagtagaaccttctatatttcaaaaagaaaacgatgttgtttacgctgaaaaatccgaatcaactcagccggttctgattgattttcgcgccggagccgtcgatcaaaagcattttcctctgaaaacatggagaaaattatacaatcaagttttgacatcagagaaaagcttcctgtacggtgaaccgttcggcgagagagacctgcgtgaacaaattgccgcttatctcttggaatcccgcggagtgaaaacagatgcggattccattatcatcggcagcagcacccagcagttgctgatatatctcagccggattctgaaagaggatttttcgggaatgatcgttgaagaccccggatttgacggtgccagagcggcatttcaatttcacgggctttctctggaaacgatgcctgtctatgaaaacggagctgatttttctcaattacatgcaatgaaagaaaaattaatctatgtgaccccctcccatcacagcccttacggcgtaagcatgtccattcagcagcgccaaactctgatcaattgggtgaatcatagagagggttatattcttgaggatgattatgacagtgaattccgttacacacagcagccgtttcccgctcttgcttccattcaatcagaccgggtgatttatttagggaatttctcaaaatcctttcttccgggcatccgcataagctatatggttttgccgcagcgccttttgcaccggtataaaaaacggtttattcatttcgaaagcaccgcttcttcgcttaaccagctgaccatggctgaattgatgaaggccggtgaatggacccgccatattaagcgcatgcgcattgtttacaggcgaaaaatgcagcacttgatttcacatgtaaagcagcagttcggcgatcatgtgacgatcatcggcgagcagtcgggattgtatatattggtgagagttcacctgaattatacagaagaaacattaatcgaacgcgcttttcagtacggagtgaaggtatatcctaccgccgtttatttcgttgccgaaaaacccgaaccgccgatcataaagctaggtttcgcccatctcgatacggatcagatcacacagggcgtacagcttttgagaaatgcttggctgtcatgaaagaaaaaaggcgccgaacggcgccttttgttatctattatttcttgtgaatttcggcagtccaaatatgatggcggcgatgccgcagattccgattaaaacgggatagaaagagtatggcaggatgctgacgggtgaaatattcccgaatttcccggctgataacagctgcgcgccgtaaggaatcaatccttgaatcatgcaagaaaagatatccagaatacttgccgattttctgttgtcgatgttgaatttatcagcgatattctttgcaatcggcccggctgcgataatcgagatcgtattattggccgcagccagattcgtcacgctgaccagtccggcaatgccggcctcggcgccttttttcgaacggattcgtttcgtgatgaactccagtaaaaagtcgatcccgccgttttgtttcatcacgccgaccatcccgccgatcagcatggacaggatgatcagatcgctcattccggcaattccatccgtaatcgccttaaaataagagtcaagcgtcaggctcccgcccgctaatccgatgattcccgtcaaaaccaatccgccgaatatgacagccatcacattaatacctattaacgcaaaaactagcacggcgacataaggaagcaccttaatccagttgtaagattcagcacccgtatggccggcgtggcctgccggaataaaaaataagataataacagtcacaatggcagcaggcaaaacaatcagaaagtttgttttgaatttatccatcatttgtgttttttgcgtccggactgacgcgatggtcgtatcggaaataaaagaaagattatctccgaacatagctccgccgaccacagccgccatcgtaatcgcgccggagatgccaagctctccgctcaagcccgcgctgatcggcgcaaccgccgcaatcgtgcccattgatgttcccatcgatatagaaataaaacaagcaatgataaacagccccggcagcaaaaactgctgcggaataacgctcaaagcaagattgacagttgaatgcaccgcccccatcgcttcagccgctgaagcaaaggcacctgccaatataaaaatcataaccataatgataatatcaggatgtcccgcaccggaagcgaaccattctattttttgattgagcgatttcttccggttaaataacagcgcaaaagctgacgcaatgatcgcggcaatcaagatcggcaatttataaaaatctccggtcaccagaccagagccgacaaaaagccctacgaataagactaaaggcaataacgcccaagggttctttttattgttcatctgggtaaaccacctcttttcagcattaaagtcgctaatcacagtctaagcaacatttcacactttaaaagtctgcagtaaaaaagtcaagctgaaaaaaggataagtaatgattgataagatagaaaaagctgttttgtttcctctctttagaaaataaaaaaaaccaaggctcgtttcccttggtacatttcatgcggcccggcgtccgggacaccttctcttcattcagaaatacattcagctttcaatctgtttttaagtttcgcttcattttcaaggatatcttcgtaatcctcaatcttcctgtttaatcgttttatggtttcatcaatttccctctgtttctccgtcagccttttcctttcatttatcaggatgttttttcggggttcgatcgtatgatcggctccttcaataaataaagcggtatattcaatcagcgcctcaatcgacagcccggcacttctcatgcattttataaattgaatccaattcacatcatcttcgtcataaacgcggatgccgctttcatcgcgttttaccggaggaatcagtcctatactttcataatacctaagcgttgcggctgataactcaacctgctttgcagcctgcacaatcttcatattcttaccacccgtccttcatacctttcataagcgtgccattataggatatcatttcataaaaaaataaaccaaactccttgacttaaagtccgctttaacatttaaagtaaaatcgaacagaggattcatcactttatcttggaaaggaagataaccatgtgtaatagtcatccgactcgtgtattaagcgctccgcatgcaaaagctaaatttgagcggacgatgattgagagaagagcattacggccgcacgatatcctgattgatattaagtacagcgggatttgtcactcagacatccacagcgcattcgatgaatggggcggcggaatctttccgatggttcccgggcacgaaattgccggagttgtggaagccgtgggtgaagaagtcaccacatttgccgtcggcgaccgtgtgggtgtcggctgttttgtagactcctgcggggaatgtgaatactgccttaacggagacgaacaatattgcacaaaaggcgttgttcaaacttataataacctggactacgacggaaaccctacgtacggcggctacagccagaaaatagttgtcactgacagattcgttgtccggattccggatcagctggatttggatgctgccagcccgctattgtgcgcgggcattaccacctattctccgctgaaacactggaatgccggccccggcaaaaaagtggcgattgtcggaatgggcgggctcggacatttagccgttcaattcgcgcacgctttaggcgcagaggtcaccgtcctcagccgctcaatgaacaaaaaagacgaagcgcttgaatttggagccgatcattactttgcaacaagcgatccggatacatttactgaactgggcggacgttttgatcttattttaaatacagtatccgcgaaccttgacgtagatgcctacttatctctgcttcgaattgacggtacattggtaaatgtgggagcgccagctaagccggactcatacagtgtgttctccttaatcacgggccgccgcagcattgcgggttcactcgtcggcggtattccgcagactcaggagatgcttgatttcgccgccgagcacggcattgctcctaaaattgaagtgatacccgccaatcaagtcgacgaagcgtacgaacgggttctccgaagcgatgtccgctaccgtttcgtcattgatatttcaactttataatcgatataaaaaacataccaatatttgttggtatgttttttcctgttcagattattttttatttcagcagccatccgggcaccgcttttatataaaccaattcgcctatcagctcaacaatcgtctgtgtgacgataacagcgacggctaatgaggcccaagcatccggcaaagccagcgctaacggaaggactgcgagagaatttcttgtgcccgtgctgaagatcaatgctcttccttcgcctgtatccagacggaacgcatatgcgataaaccgggaaacaaacggcataatgagcaggaataacagatagattgggatcacacgtataatgatgtcagcatcactgatgaccttgccgatttgtgtggcgacgaccgccagtaagaccagagccataaaaggaacaggcagccacgccgtccactctaacatcttttctcccgccggcttcttatcagcccataattgagtcatcaccgccgcgagcagcggcaccgctattaaacataagaatgcttccagaaacggttctgcatgaacagctcctatcacttctttcccgataaacagccacaggtataacggaagcaataccatctgaagagcgaacaaaaccggcgtggaagccagtattaatctctcatttcctttgccgagctgagtaaagacgatgacgtaatcaatacaaggtgtaagtaataccaaacaaacccctaataatataggaggagattgaggaaaaatggcggttaacacccatacaacgacaggtacagctaagaaattaccgatcagtaaagccgccataaacttgaggtttgacatggcttccctcagcttcaagaatgggatttgggcaaacatggcatacatgagaacagcgataagcggtgatatcgtccatccccagcgaagtcctgaatctttcccggcgatccccgctattcctccgatcacaagagtcacaccatatatccaaatttgctgtttttctaatgtctctctggttattttcattggctgacacctcttccccgcccattataccttcttttctgccggaattaaaaaacaccaagggtctgtgacacttggtgtttttggaacgcgtgttattgttgtcaaaaccgcttatgaaagtttacttatgttctctgtcctgccaacgaataaggtggccgcaacactggctgaactgaccaaagttcccaggacggcagcaagaattgtcaaaaagccattgggaatcagaaatccaatcggaacgagccccgcaaacgtgaggacgataaaacattgatagactccggatatgattctcacaaccaaactgccaaaaaaggacatgacgaatggcggaatgaacaaacataagatgattccgagcgagatcaataaaatcataggctcgtcaaaggaaatgacacgatcgccgggagactcttcagcagccgcgaatacagcaaatatagacattatcagcgtaagaaaaacaagaaaaaaccttttcagcaacgttatgactcctttttttataaaaacggttatctttttttaaaatcacgataaccattttacgttatcaaatgaaataatatgaagtcaaaccgagttctgcacctgatttattggttcttatttttttgataatttccatataattgtccgcaagcagcatctatatcaatgccaaattgacttctgacggtcacgttaattcctgctgactttaattttttatagaagtttacaacttgtttctcatttacttcttcaaatctcataggtgaactaacagtcgggttatatctaatgatgtttacatggaacaagttccctctcttatatctgcttcttaaaagatttactacttcattcgcatgatcaatagaatcattaactcccggcagcataatataagcaatataaacttttcttgaggtcacacgtatatgctcatctaatgtgtccattacctccaataacgggaagcgttcattaatcggcattaacttgcttcgctgttcattaaaaggagaatgtaatgaaaacgtcaggttgacctgcggataatcctgtgtgattttttttatgcccggaataatacctatggtcgaaatagataacctgcgagggcttaaagcaaacaactccggatttgtaagcacatgtaaagcatcaaaaacttgtacattcgctaatgcttctcccattcccataaaagaaatactgtcaattgaatgtccttttaagtgaaagtacaaaatttggtcagtcatttcatctgacgttaaattgcgtttcaaaccaatatctcctgttgcacaaaatttacagccgaaatgacagccgcactgcgaggatatacaaaatgactcccaaccggctttatatttcatattaaccgtttctattttttcgtctcctgaaatttcaaataagacttttgtaacttgctcagaatgctgcacttttaaaggagcaatatttaaaattgactctccgaactcctctattaacaattttctcaaggatttaggaagaaccgttatttcattgaaatgatttattctcccttggaatacagcatttttgatttgattcattctaaaatcaggaaattttttttgcttcaggaactcttgaattcttatatacttgtttttttgttgcatgttttctcatccttccataatactctggtttgtttgagtaaatagaagggagtgatcatctaacctttttttaaaatcaggcacaaaaaaacaccgacacaattatcggtgttacgcttaaataacatcatgcacaaataaacaaggacattatgtcattggattacgtttatttgacatagagaaaaagcaccgataactgtttttgtatggtgatttggcttaaaaaaggacagactgctccctttatccgccaagacgtttccaatttttgcgtttttaccatacaaaattccataaatcgttatcatcgctttcacctctttcttgtcaatattagcaataatcaccatatcataaggtttcccttatgtaaagctaaacaaatgcttacgcccccgctaatgacagtattatataacttgcttattaagcctaatccaagtacagaaagcacgctgatcacatttttcacttatccgcgacggaacatttcttatataatgggtgaccggcagctgcctgcttgaatcccaatcttcctatagtgattttttatattcatgacagtatgatgatttgtcacttcagcaatcagatcgtttattcgatccagattaatcggtttattttctgataagctgctgaagctttctctgatttcttcaggatagacatttccggccatgcttgacaggccgttacacccgttactcagcatcttcggaaattcaacgtctccttccgcaaacaaaataaagtgatcagggaactctgtttgtttatgacgcagaacgtctcctccttctttcagcccccttatcccgggatgccggcttattaagtctttaagcgctttctcactcagattaaaaccggtccggccgggggttattataaagcacagcctctttagaggtatgactgagaagttcgtcaacgtaataaacggcttgctgctgtgtcggtcttatataaggaggaaaaccaatcagtacagaatcaatattggttttctcgatgtgtttcatcagtttgacggcatcactggttcttacggctgaaacaccgaacatcagttcaacatcttcaaatttcgctgattaacatactcaatgatctgaagacgctcatctatgctgagtgaatgctgttcaccagtcgtgccgcatatgagtaacgaatggataccgctgtttttcaaatgttcgacaatagcatcaaatccttctaaatataaactttcatcttcatgaaaaggcgtagggatagcaacattaaaatttcgcatgagaatgtcctccaagtacatattcttgaatatctgcagagtatcatataacactgtctgacatttaaaaaggtacagtttcagataattcagcatgtcagatgtaaagaccgacacacaaaaaaaagcaggcaaagagagcctgcttcatagcttcgtcttacagcggcccattccctggattacttgacaaatatgagtaataaggcaaactgaatataaaaattatgctaatgaggtagggttaatgattttagatttaaaaggtgaaacgcacatggatcatcttgtgggaatgctgtattctgccgttaatgaaaattacaagcaggagatcgattataaaggaccaaatcaaacatacaatagtgcagctcagctaataaggcacttagcatatgttgatctcaactggatattcagaataaagggtgaaccgataccaaagcagcttgaagagaagtatggaccaatgttagatcagaacaataagatccctttcatttccggtgtttcattaaaacaaattctcactgattatgaagaagtattcagcatgtttaagtctgtttgttatcagttaactgacgatcagctgaatcatacagtagattatgaagcagaaaaacaagcaaccattcaatggggaatatggcatatggcagaccataatagatatcatcaagctcatattcatcagcttcgcaaatggtttgaagaggaacagaaacttcgcagttaagccgcttattaggaggagcaaggataaatttattacatattccctgcggattgtctattttcactgactgccaatcaattaaaatggtcagacaaaaaaccacatttgctgttgaaaagttgtggaataaagcatcgcatcaactgcactatgacaagctgaaacgttaatattttgtgtttcagccatttcatcatgctgtcccaataccattttttctatagtctttgcagcagcaaagtcctctggaatcctatactaatcttccgcagccgctgcatctgcctttgtcacatgaactgtaccgaacggatggttgggaggagcataaattgaatatagttttaacggcgtattacccgtattaataacattgtgccaagtgccggcagggacaacaatggcataatcatcatagacatttcttcggaaacttaaattatttttactcttgcccattttaactatccctcggccttgctcaatccgtaagaattgatctacgtgaggatggatctccaaaccgatatcttctccaataccaagactcatcaaagtaatttgaaaatgctctcctgtccatagggccgtacggaacgtattgttttgttttgcggctttattgatattcacaacaaatggttttggtccataatctttcaaaagaaggtttctatcttcgtatgaaggatcatagttatttggaacagtccaataaacagatcttccatcgctatacatcggtacattcgcacaataataacattgatgcgaaaaaggtatataatacatttttcatccccgcaattttaaatttttgtgatattatcctatgctttttgtaatgagagtgtgccacactaagatattcccttgttcagcctaaaagacttaagttagcagaaacgttttggccacaaaatccgtttgcataaaaaataccaaaggtctgcaactcttggtaacactgttacagccgagaaacttgaacctgcccggggtatgcactcaccagtccgacaaccagagatagtgtgttttctggcttgttatttgggctatttcgacttttgcttgaaagaattaaattagtgagtctgaacgaggagtaaaggcacgctctccatgtgaatccatttagttcaaactgaatatgcgcgaactaaaatagttgcactgatggataatttaggcacatgcccttatcaaaaacaatctgggtgcatatcctgctcctaaaagtcattcataaagggagtttagatatgtattattattatccgtattatgtatatgattacagacagcagcctgatttaagtcaggcaaatcataaaatgcgaagccatttatctgcgattcaacaaattccaatacactcatcctcctttcaacaatcaatggctgcagtagtgaaacacttgcaggctgtcagcagagcactcgctctgggatgcggtatgagttcagaattcagatttcttccagacacttggggattacgagaacttcatattgtacacgcgaaataccttactccgttgagctatcacgtttattccgctttaggcgcggcagagcttctcgcctccggacaaggccgtgctcctcattttcctcttatggttggctgcatgaattcaatacttcgtctatggtcaaacttccccgcagcgatagcagacctgcgaagagcagccggtcaccaatacgcgtcatctgtagacgaggcggaaaatctcctaagaccaatggttccagctacacaacaggcattatccatcagtcaatctgcagtgagtccggctatttggcaggcttccttacgtgccgcgcagttagctcgggaagtacgtcagaatgttgcacaatcaatgagtcagggatcttcttattaattaagccaaaagattttttcggctttacacagtcatataaccggacttattcaacacaaaaaagagcagtaaacccgtaagttactgctctcctcagtctatccaccgttcatttgttttacaatgtattcagcatcatttcctacaccttgaagcagcgctgaacctcgcctatgctgccaaggcaaaccaataaaatacaatccttccacagctgaaacaccccggtgatgtataattcggccttccttatccaaaacaccttctattttcatccaacaaagcggattcttaaaaccagttgcccaaatgatattgtttacttctaatgaagatgagtctttaaaaatgatttcattttgctttccggctatgactctttgttttaagatgatcttcttctgtcttatcgcatgttttaattcatacccaaatatggggtcgcctttcttttgaatgaacttgcctaatattgatgtatgacttgcacgtaaaactcctaatttatcaaaccaccaaaagatgcttctttttccaatccataaagggaaataagccggtttattactgcaagccaaatatgtaactctttctttggataattcaacagctatctgagccccgctattcccgccgccgacgaccagtacattcccaggcgccagttgttttgaatgtttatattgtgaagaatgtaattgatgaatatgatcggctacatcccttgatattgatggaatgttaggggtatgaaaaggacctgcggccatcacaagattcttcgtttgatattcttcccagcttgttcttattaagaaatcgttctttaatttttggacacttattacttctgttcgtaattggatcgggatttcaaatctttcaacatattttttcaaataagcagcaatttcattttttgaagggagtccatgcttgtctccttcaagctgcattccaggcaaagagctgtacattcgagaagtaaataaaaccaacgagtcataccggtttttccagctttctcccacttcatgacttttatccaaaatgataaacttttgtttcgacttctttagataatatcctactgagattcctgcctgaccagctccgattactattgtgtcgtacatatgaatcccccccgcggttttatcttaattgtcagaagacaaagtgagtcccctattaatgatgatgatggtcatgcggattctcagtttgagcctgacaaagaatcgtattgtcgtgattatgcgctgctgtttccatttgaatggttacatgtgtaatgcctttatctccaagttcatgttcaattttgcgtaaaatactttcgctttctgaaatggtcagttgatcgttaacaacagcgtggcaggaaagagcattcaatccgcttgtgatagaccatatgtgcaaatcatgaatgctttgaattccttctgtctcttcaattgtatgaatgatgtcagtgacatcgatattttccggagttccttccattaatacgtgaatggagtctttcgtcacatggtaaccgcttctcagaacaagaatagccacaatgacactggccgctggatctgcccagctccacccgaagaagatgataaggatcgcagccagtatggcacctacagatccgagcatgtcacttatcacatgtaagtaagcccctcttatgttcaggttattctttgtatctccgccgttcagcataatccaagcgaccaatatatttacagctaacccgatgatactaatcgtcagcattccggttgttgctacctccggcggatgagagaaacgtttgattgcttcataaatgatataaagggaaatcaatattaatgcaacaccgtttatcacagctgcaagaatctcaaatcgtttgtagccgaatgtcttatgatgacttgcctttttttcggccaatttaaaagcaatcagagcaaccattaatgagattgaatcactcagcatatggcctgcatctgataaaagcgctaaactattggttaaaaatccgcctatcgcttctattatcatataacctgtaatcacgataaaagagatcaataaaaccttcttattagatctgccagcgtgtttgtgattatgacccataaaaatctcctccttatctcatacactgcatttattatttcttttctgttatgaagcattctaacatggacacaaaaataaccatatatgattatatgctcatatatgaatatataggttctttactgaaatgtcaaaatatttttgatgaaaatgtccaatactttatattgctcttaatcaatgattggtatgaagccgcggattacagtaattactttaggcgcagacactttagaaaaatcgctgcacttctatcaggatggcttgggtctgcctacagaaggaatagcctgtacagaatttgaacatggcgcacagctgctttttttgacttgcaaacgggacttgccctttgggaccgcaaaaacatcgcacatgaatcaaacgttacgttaactgctcccagtactgcggaatttacatgaggacataacgtcatcagtaaagctgaaggcgataaagtcataacaggcaggagcaacgataactgatcccgctcatgatactttttgaggcggatatgccggtcacttccaagaccccgatggacacttatgggaaatcgtttggaatccgcactggggtataagtgaataaccacatttcagaaatgaaagcaacaataaaaacacacctgaatgttctggtgtgttccaacagaatgcaaacgcagcattttattttgtttcccaaaacgatcaaactatttatacgatggcgggatgctttgcggaaaacggaatacattttcgggatcgtatttcgcctttattctttgaagccttgcaaagtttgagccataatatgctttcccgaagttctcgatattttgatccggaacattcacatatgaacctgttacatatggtttcatcagctgacgcactctttcaactgatgcaagattcgaagcttcttgtgatttatttttccaactggccgtccattccgtataaaacaatggccggcgccaatagaaggctgtttcactgcttggaactctgcttatcgcgccgccccaattgataaaaaagaaattggtttctgtcccggtcgctttttctaaaaattgtctcattactgcaataggttcttccggccaaagattgagcgcccacgccgaggagaatttaacactctgatccgatctgccgggaatcggttcgtcaggatctaagaaatctatacaatccgggtagtatagtgttttgattactgtttgtgccggcgttccggcatttaataaaggttttaataattgaaccagctctggttttgaaccgaggaacaatccttccacatggcacaagccatttactttgctgtaaatctcaaggtagcatcctaatcgttcgtctgtaaacggcgcccatttttgccacgctttaaataccgtttctaactgttcccacggccatataatattaaagacggttgcggttttaggggcacggtgaactttgaacgtatattgggtgttatatccgaaattgcctcccccgccgcctctggaagcccacagtaaatcttcattgcgggattgatttgcttgaataatcctgcctttggcatctaccattttcaatgcgagaaggttatcgcttatcaggccgatcgatcgggaaagcactccaaatccgcctcccattgtgattcctccgattccgacggttggactgtctccgaacggggccataaaaccttcccgagctaaaccttttacaagcgggccgacgtgaatgccggtttgaacggttgctaccgcgtttttttcatctaagaaaactttattcatgtcactcacatcaataacaatcccatcacttaccgtggaaagatttttatccagagcatggcggccgcttctgacacgcataggcacattcttctcacgagcccatttaatagcattacttacatcgtatgaattttgtgcaaaaacaaagacaagcggacagacatcaacataagggttccaattcttaaccgcctgtgtatagccggggtcccctttgaagatgacgcgtcccgttaactgtgctgatcccatctatttcactcccaataagcatttgattccgataccagtatatgtaggaattggacaaattcttagacagatgttctgcaaacttataaatagacacatatacgcgaagatgatttgaaaacaaaaaaagacaagagcggcaagctgccgaaactcttgtctctcctgccttttttatcatgataggcacttacatttattgacgtgatatcccgaccaaactatggaagtccatagaaaattatgtttgccctgccatgcgtggttctgctgagacaccggctgagcaatctttctgcttgatcccccgacaagaatcttattctttatcgtttttgcacccctgtacggataacatcaatacacattgaatcttatcttttacatgatgaaaagctcttattttttcttcttgtgcttacgtttgcaatcctgttttttctctttcttatgacgttttttacatttcgcttttgctgctaattttgccgcttctacctttgcttctgctgctctggctcttgcttcttccgctcttgctattgcctcttccgctctggctctcgcttctgcttctcttgctgcttccgctcttgcttcatcgtccgccatatcaaaatcatggccaaggtcacaggcttcgttgtatggctttttcttctgaacgtactgttgatcttcaccttcgttataatacattacgccactccttctctcatttttcaatctttacatactatgtaaataaataactgcagcttggactggtattttgatgaaccggcacattttagggcaatttccatttatcgatgcaacagattctggatgcttgatgaaacttgaatgctttttgacgattattataagcagcgtaaaagggagactacgaaaaaggatgctgcgcgctgcagcatccttctgtaccaactttttgtgtttttgacttttagtttgcttgctgtgtttgttttactggttctttgctaaaaagtccgacaatgttccacaagataattgcagcagctatgatcaaacgagccgtactgacttcttggttagtaaacaatttatagccatatattgatcccaatgctgctatgcaaaaaatattgaaccatttactccaacgcaattagaaaactccttataaaatgattacatttccaaacaatgtattataatattaacaaaatttttcaatatttaaccttaaatcattcttaattggttttcctgatcattttctctaatcgtcattcaatctttcggagttttgatcgttttttgttacaggctagacccagacatcattttcagctgtttgatcagttatttcctgcccggtattcacaacacctttaggttctgcaagcaaaatgtgacactctgattctgcataaggtttatgttcaacatttttcggaatgacaaacatttcaccttcatttaattttacttctccatcacgaaattcaatgattaaattacccttaatgacaatgaagacttcatctgtttcgtcatgcttatgccaaacaaaatccccttgtaccttaacaagtttaaattgataatcattcatttcagcgattacttttggagaccattgatcttggaacgcagctaatttctcttggaaattaatcggtttatattccattctttccccttcccgtgtaaaacacaatcatttaactagtcccaaattaaaggcctgtccacttcagcagttctgagatagtctaaaagctgaccggtatgtacggactcatggtaagcgattcttaataacatgtctcctagttcgcgaatatatccaacatcagacctgtcaatctttatatttgttaaatctgtttcgtttaacgatttgatgaatgtcaaaaactcggcccgatacggttttgcaaattctaattcttcggttactgtggtaaacgtttttgattcatatgggtttttagattcctctgaagactcattcatttgttttagtaaaatgtgatgataaagaaattccgcttctaatacatgtcttatcatttccttacacgacattgcttcggaatccgggcgccagtccattttttcctcaggtatagctgtccataacttgatgcttcgccgtcttacttcttcaaaatttaaaataataaggtcaatcgtattcaagtgttttcccccttttatttttaaataattctccttcttcccggaaaaaacctctttaaataaaaaacgtattctttcccgactcgctggattggtaatttaagataagaagatattcattcatccatacaatagactctggctgaacatatactgaatgatagttttcatcagaaaggagaaatcagctttggcaaaatatcggatcatgacctttgacgggggcggtaccttaggtgctttaagtttacaactattgaacagactggctgaagaaaatccagcattaataagccgaacccatgtatttgcgggaaactcaatcggttcatttactgcccttgcattagcaagcggaagatctccgaaggaaacacttcagtattttgaggatgaaatcctgcccgcattcagcacttcccggccgggcggacctgttttcaatcagcaattaccatactccggttttattaaagcggtacgaaactttttcccgccaggccttcgtcttaaagatgtaagaaaacgaattgttgtcccttcattcaaattatactcccccgcactggatcgttggacgcccgtattatttcacaactttcccggctctccctatttaaatgagaaagtgagtgatgtcatactgcggagcagcggtgcccccgcgacgcagcgagcctatcaaaactacgtggacggatatgtagtggcaacgaaccccagtacggccagtatcgcgtttgcggttggtaaagccaacgtgccattggatcaaattgcggcgctatccatcggtacaggtgaagccccgactcggttaagaagagatacgagagggtggggaatggtaagtgcggataacatacgtcccgaaaacctgaagaaccttcctccaaattggggagttcttttggacaggtcgcctaatgaacctttactgccatttcttcagatgatcgccggcggaaatggctactatgaatctatggtcagcgcgaaccttctgggagaccgctttttccggttagatccgcggattcctaacttctccaaaacagacccttccgtggttcccgctgtcattgaaattgcgaacaaaaccaacttacagcctgcgaatacatttatagagaaaaactggaacgacagccactaaggaaattcacatcttaaaacaatgaacaaaaaataccaagggactcaaaacccttggtatttttaatgcggctgagagggtttggaccttcacgggttaattatacgctgggcatttgataaagtgaaagcttattaccgcccggcatttcaagcactgaagttaagcattacacccaacaatcgggccatttaattgaataggactactcagaagccgcttcccattacgtaagaaaagcgactttttagatttgattttcaagttcctttgacaaattttgaaaagaccattgactattcagttggactgtattaagtttaactatatagtcagactgaatagaggatgaggatatgaaacataaattattaccgctgtctgaaaccatgcattatattttattagctttgcgggagccgcttcatggctatgccgccatgcagaagatcgaaaagatgagtaacggaactgttattttagcagccggcacattatacggcgcgattgaaaacttgaataagcatggctggattgaacctgttggagagtcgggccggagaaaagtttatatgataactgcggaaggaagcgccattttgaaaatggaacaaaacaggttactgcatattttatccctgtacgaaggaagtgaatcgaatgaagacatttaagatgttttttgatattgaaaaagaggagcaatggctgaacgagcaattgcaaaaaggctatcgctgtacaaatatcagcggattaggaatatacactttcgaaaaaaccgacaagagatatgtgatgagactggattatcatgattatttatcaaagaaaaagttcaaagactacagagagatctatgaagacttcggctggagttatataaacagcccatggcttagcggaactcgatattggcagaaagaagatgatggtcaaaatgaaatcttctcggatcgccaatcaaagagtagttattataaaagactaatgagttattcatcttgttttggtttactttgcttattttattcttatttgatttacaaggattcaggtttgtatttagctgaaggtctgtggagtatggaaggcgcaatgttttggaaagcatttttatttgaaactccatttgcccttttaaggtcgcttcccgctcttatggctgttgtcttcggcatcagttactataaagcgtatcgaaaatattcaatgttaaaggaacaataacgcggggaagttacattcaagaagtaatcgaggattatatatctgccgaagccgggcgctttaacggaaaaaagcgccctgaatttgctgataaatcagacggcttattttgttaatgatacatacttatttacaatggcttgagcgagacaagctgatgaatcaacaatgttgagttcgctgcttttttgatccgtgaccatatttaaatccgtacatgcaatgataacagtatcaaccttttctgctaagtcacggtgtaattcatcatataatgtaccagcctcattgatttgaccttgtttaatcttttctattatgtgatcgacatagatttgccaactatcttgatgtaaaaaatcataaccttctctgtttaacgcttcttgaaatattccagattgaaccgtaggaacggtggctaaaagagctgctttttttgaacctttagatattttttttatggtttcatcaaccatgtttagtaaagggactgaaagcgatttttttatttgattaaaatagatatgtgcggtattacatgggatggcaataaaatcaacacccgttttttcaagctttacagctccctcaataattgccttttccatgtccgtatgattgagaggtttattcatatagaaaggagtcggacaagaataaatcatcatatgagggaaatccatgtcatgtattgctccatatattttttggcactcgtctactaccttatctacaaatggcccagtagattttgcccccattcctgccagtattccaatcataattgtcctcctctgtaaaaatgtgtacgaatacgatcacgatgagttattcttgtgtttctcatctgaatctgctctcatttcattttggctgtcttctcctattttatcatttcattaatcgaaaaagggtctttaaaaaagatagctggcaaaccagacgacttgctataagtaacggggcagctgtaaacaaaaaataccaaaagtgtcagaacccttggtatcattgtgatgcggctgagaggtcttgaacctccagaggttattcacccgctgggccctcaataaagtgaaactgtgctttctattacaaaacctttatatattagtgtttgtttataaggagtgatgaatcttttaatctttcattttacccgctgactcatatcaaaggagctctaaccaaattttaatagctgtcgcacttattaatagcgctaaaatccattgcaggaattttgtatttactttttgcccaactgatgcgccaataggagaagcaattaaactgacaatcataagaaccagagccggtgcaaaaagaacctggcccgtgattacttttccaactgttgcgccaatagatgaaagaaatgtaatcgcaagagatgaagcgactgtgattctaacagggatatttaaaatcgataacataatggggactaggataaaagcgccgccagctcctaaaatacctgatacgccaccaatgataaacgctagggacgaagccaaccatttattaaatatcacttcttcgtcttcgctatgttcttgtccttttttaggtataaacattaaaacaactgctagtatagccagaattccgtagataaagttaattcctttttcagatatataatgagaaaagtaactccccaatacactccctaaaaggatgctgcttcccatgtacataattaacgctttatttaaaaaaccacttttacgataagcccaaacaccgccaagtgtcgcaaagaaaacttgaatagcccctatccctgaaacttcatgggcagttaatgacatcactcccactaaagaaggaatgtataatagcattggataattaataactgatccgccaatacccatcattccggaaataaaggcaccaataaaccctataatgaaaagagttgtgataaaggcaatatccattttagttcctcctttcaaagaaaaagggcatctttgtattcgataccctttcacattcattagccttttttaatccagaatttcaatacatcgccttcatcagtttgctctaaaaggtcatgcccgcctgatttagaccaagctgcaagatcatttttagctcccttatctgttgcatgcacttctaatatttgacctgattccagttcattcatcgctttctttgttctgacgattggcattgggcatgccaggccttttgcgtctaatactttatctgatttcatgttcatctctcctctttttaatagaaacttgtgttaccgtattgcacagcggtttggaccaatctccatttcacgctgtttttcttcatccgggctgattttccccatgtttgttttccgaatctcttggtatgcatttggctgcggaggcaaatgatctgttactaggtgtctaaattctctttcatccgcaatgttcaaaccatggttctcgctaaataatgtacttagttttttaccaacacttccatcatcatttagctcgtcaatgatcataaagtgtgccggtaatacaattaaatcctgtgataacgcgttgtaacggctataaagcgttgttcttaaatcttccgcccaatcttctgccataccggctaagtctggtcttccgattgaatcaataaacaagatatcacctgaaagaagatactgatcatcgacaatgaaagaagtggaaccaatcgtgtgccccggtgaataaatcggttgaatgccaatctttgtgtttccaatgacaatatcgttgccttcttccagcggctgataatcaaataccgcttcttctgcatccttcggtggtaaccagtaggttgcttttgttttttcagctatgactctgccgcctgaaatatggtctgcgtgaagatgtgtatcaaatacgtgagtaatctccgcacccttctctttcgcaaagtctataaaaatatccgccatacgtgtcgcatcaataatcgctgcttcaccattggagatgaccatgtatgacaggcagcctttaccgattcgaacaaactgatacatctcaccgccatcttttaaatccccgacttttaccggctctaaatgttcgctccatgctttcattccgcccttaagataggatacagaatgacctgcttcagaaagcatttcggataccatgacagatgaaccttcttttgcacaaacgaccagcacttctttatcagaaggaattttctccaagatatcttctacgccatctaaaagatcgaaatacggtacatttaaatggtcaaaataatgtccttcaatcttccaatcgctaaaatcattttcattacgcacatccaaaataaataaagattctttgtgaaagattttttgtgtgacttcttttgcggtaagtgcttgcacggtcatgtttacatacctcctttttctgttttgcctgtccaatcccgcataccgggaataacattaataacctttttaaaaccttgttttttcatggtgtgagctgccatttcacttcttcttcctgaatggcaaataatataaatttcatcatttttgtttaatgcgttagagcgcttttccacttcgccaagagggatatgcaccgctccggggatatgggcttcttcatactcctcgatctctcgtacatctaaaatgtgaagagactcatcacgatccactttctgtgtgaaagcttctaatgaaatctcaggaattgaagatgcattttctgatgaatgctctcctccttttcgaagaaagtgacgaaggacttctccctctgtttcagtacctagatattcatggcctgagctttttgcccatgcttgcagatctgtcgccgatcctttatctgttgcttgaatttctaatatgtcaccagcttttaattcttttattttcttctttgtttttacgataggcattgggcatgacaagcctttagcgtctaatacaatatttgctttcacgattttttcctccttttcttatataggggtgggggtatataaatatgcaaaaagttactctctggatgttaataccatgtattcataccaccttttatatttgtgatatttttaaacccttgtttcttcaatattttacttgcctttatacttctcattccgctttggcagatcacaaagacgtctttgtctttcgaaagctgatgagtttgacgaggcaagatagacaaaggaatatttttgaaccctttaatatgccttgtgcggaactcataaggtgttcgtacatctataaactgtttgtctttatttttcagctctgactttaaatcagcagttgttatttgtttaacaccatgcaatgggaaaaaacgtcgaaatacgatccaaagtaaaaataaaatgagtaaagtattgaacattactccgctattcatagtgttataacccccttcacttattcaatttgcaatggataacattagataaataagttgacattgccttcttcagcatctgccaaataagcagctacaccagcatagtcgatatcatctaatagttctttttcctgtaaaccaagaagatccattgtcatcgtacaagctacgagctttacaccttgttcttgagccatctcaatcaactgaggcaacgtaagtgcattatgctttttcatcacatttttaatcattttagggcctatacctgcaaagttcattttagataaacccaacttattagcaccgcgaggcattatctttccaaacattttttcaagaaatccttttttcactggaatcagctcttctttacgtaaagcgtttaatccccaaaacgtatggaagatcgtcacttcatgatcgtaggcagctgcaccatttgcaataatataggctgccattgctttgtcatattcgccgctaaataaaacaattgttgtgcgttttgtttgttttgtcatgtttattctcctgactaaatcactattacccctgggggtatattagaattaaaatttttttcgaaagatctcctattattcaatccaaaataccggtaggggtatattataataaataaaaaaattcgtcaaccttaaagatgataggttgatgaatttttttatcggctctttaccaataattcgaccgcttcttttactaagtgttgtgtgtcttctcccttttctaaactttcacgaacacaatgttcaaggtttgtgctcacaatcaaacccattgctcgatcgatcgcattacgtgaagcagctaattgggtcacaacctctctgcaatcttttccttgttccatcatggtcaatacaccttttatctgtccttctatccggcgtaagcgatttttaatcttttgatcatattccatgcgttgaactccttctttgaaatttatatatttgcatgttatcaactatcacttcatactctgctttatcacactacattattaactagataatgtttgtgaatcaatattatacccttacaggtatactgtcaattttcaagacggcatgagaatgattataaagagttaatattagtatcccctgttttacgttaaacccaaaagattaatcacaattgatgtcaaggcatgaactcctaaaggagatttaataactcattttcaacgaaaaactgatctctgttaattagtcgagattccaagatatacacggaccaattgacctttccttttttaggaatcccacaggttccctcttattttgatgttgttttttaaaaaaagttattgacaccaataaatgaccatgttatcattaaaaatttgatatctcactccatatatggtaaccttaagttaagttcccatatatggaggtggattatatgtttcaaattggcgataacattgtttatccaatgcacggagcaggtacaattgaagccatagaagaaaaacaattcttagaggaaaaacaacagtattatgtcataagaatgtcaatcagtaatatgacagttatgattccaacgcgtaaaatattgagttcaagtatacggccagttactgatatacgtgcattaaaacacattatacacatttttcagcatggtgaatcagataggttactgccatggaagcaaaggtatgtagtaaacacgaacaaaataaaaacgggtgaaatacaagaaggcgctgaagttgtacgtgatttaatgcgaatgaagaaagaaaaagcacttaattcaagcgaaaaaaaaatgttggataatgcatatgaatttttgattagtgaactggaagtcattaaaggaatcactgaaaaacaaataaaaagtttctgctaaggttaattttaaataatgttttgcattccaaaaagcattcgaaagttttctgaatattacgattagacgttcaacttctccaacttacttttaaaacattaaccgcttttattactcctacaatctaatctgttttatttttttcttcaacgaacacttgaattctcgatgaaatagtcacttgatttttgtaatcctgattcacactggcacggacaaggagccgtaaggatggaagagaggcagggctttcattgttttaggtctaagtgattatttccagaagaaaaaacaaccactcccctctttatctttaaaaatttcttacatctgcttccacagtgaatagcagttgtttatcttcttttcataaaagagatatgcgaattgtaacaaagaataacatacagttatcttgagaacataaaaacaaatcatttatatatattccacatatcgtcaatccggtatgttatactgtaaacaatcctttgaggttttaaacctttttcttaccttgtagcaactgtccctactcgaacgttgagtagggtttttttattcagtatgatacagagaacataaaaaaacaggccctatataaagagcctgtttgtataaacgattgaagattaagcagttttttgaacgttagcagcttgagctccacgagcaccttgctcaacgtcaaacgttactttttgaccttcgtctaaagatttgaatccgtcactttggattgcagaaaagtgtacgaatacatcgtctccattttcacgttcgataaatccaaaacctttttctgcattaaaccatttaactgtaccttgttccatttttgttgcctcctagtgtgttacacattgtattactatccttgcccaaagtatcatcaagacgaaaagtcgatattcatactatcctttacacgaacaaaaataattctcctttatcatatcacgaaacggaaataactgcaaattaataatgtgttcattcatgttttatttgttaaacctgtcgataccagtgcaaaataagatgcctattaatagctatggtttgaaaacaccgtgaaaatgaatcacgagtgccttcaaacccagtacttcatattgattgttaaaggtttctttaaaaagctcagctgtttcttgttcaagcacaaaatattcttggctgttcactggtatagctttgtttctgcacatgtttccaaacgatcactcaggtatacccctattttaacggtattaacttgtcatgtttgttcctcaaacaatcaaagtttacggtctaaataaactgattcacataggggagcatggagagagtttggcccgataaagagctgggtataatcttcatacgctttttgtatcccggctggcccttgctaataaagatttaattgagatggagatcattttctgaccttcaataattttacacaggattaggaaagatacttattatacatggggtataacagctgggacttcaaaggcaataaaacgttttctatacgcagattaagaacatcagggaaggggaagcttttaaaaatgaatgaacaaaacctaaggactttgagaaaactggttaccccttatgaaaagtccgatttacaaaaaagtatttatcaaatcattaacacattggtgccgtttttcctgttatggtgtttggcctataagagcttgtcgatttcttatatccttacattagcgatttctgtcgttgcagcaggttttttagtgagaaccttcattatctttcatgattgctgccactattccttttttaagaaccgaaaggcgaatcgaatccttggaacaattacaggaattctgactctgcatccgtttgatcattgggcacacgatcattctgtccatcatgcgacaagcagcaacctggacaaacgcggtacgggcgatatttgggtactgactgttgaggaatataaagaagcctcaactaagacaaaaataatgtaccgtttgtacagaaatccgtttgttatgtttattatcggaccgatttacgtcttcgggattaccaatcgttttaatcgtaaaggggcaaaacgcaaagaacggatgaatacatatgtaaccaacctggggattgtcgctttggcagcacttttatgttgggctatcggctggcaaaactttctgctggtccagacgccaatttttatgatatcgggatccctcggaatttggatgttttatattcagcatacgtttgaggattcatatttcgaagaagatgagcattgggaatatgtaaaagcagccgttgaaggaagctctttttataagcttccaaaagtcatgcaatggttaacaggcaatatcggtttccatcatgttcatcatttaagcccaagagtcccaaactataagcttgaaatcgtgcataataacactgaaccattgcaaaacgttccgaccatcacactggcaacaagtattaagtcgttaaagttccgcctatgggatgaagaaggcaaaaaatttgttggttttacccacttaaaaaaaacttcctaaaagccaggtatcagctcgggtaagaacggattaaataaacgcccataatcgatgataatgggcagtgtatcttgcagaataaaagtgcagactcgcgcaaagattttgtgcagaggtcagcacttttttaatgccacatgcacttacaacaaaaaataccaaaggtgtcaaaacccttggtatcattgggatgcggccgagaggacttgaacctccacgggttattcacccgctgggccctcaataaagtgaaactgtgttttctgttataaaaccattgttctaaacacatttgccgcactaatcgttatttatgtcttgatctattcaatcaagtttaatcgatattattcgaaagtgacattatgaagttttgactgaccccttaccgtacttaataataaaaatcatgttgataggtgtatttttaaaaagcccactcacgaaaacgagtgggtttacaaaagctctaaacgtgatacccctttttcataaaagtaatccgctactctgattgcaaagttttcaatgtctccgtacattcttagaaggaaaataccattagcgatgacactaatggtacccctttgtttctactcaatcacttattcagcttctccaaccactgtaaagcgttcatttatatgttttggattttcgatttcatccaatactgcaattgcatagtctgcatagctgatataactttcgcctttcgaattcacaagaagatgatcttttcccgactgataaaatccagttcttttcccgtctgggtcaaataccgctgaaggactgataaatgtccagttaatatcagaagtttcctttagttcttgcaagttacgaccttgccctttagctgttggaataaaaatctccgggaaatcaggtgtatccattacactgacagttttattttcgtctacataaagactccctgctccacctacaattacagctcttgtacccgttccttttaatgccctaattaatgcccggccagcatctacatgtgcctgttcttctcctaatggagcaccgaaggcattaactattacatctaacttttttagatcatccgatgtaagatcaattatatttttttcaatgattgaaatcttttcctctttaagttttgcagcatctcttacaattgcagttacttcatgtcccctgcttaccgcttctttcaagataagacttccagcttttccggttgcaccaatgattccaattttcaatttaaagtcctcctaatcattcaaaattttaaatgtaaccatattgattacatgtaataattttagttacaccttatttatttgtcaatacttttatcatcttgttaattgagcatattagagtaaaagaacttgtaatacattcagttacaagtgtactataaagagtgtaatgtaattaggatggtgaagaaatcatgtctattagcagccgttttgctgtaggaattcatatattggctcttattgaaataaatgaagacggaattagcacttctgaatttttagctggaagtgtaaatacaaatcccgccttcataagaaaaattatggggatgctgaaaaaagcaggtttagtaaatgttcggccaggtattgcaggagctgaattagcgaaggatttaactgaaatcaccttacttgatgtttatagagcagttaatgttgttcaagataaagaattgtttagtatacatgaaaatcccaatcctcaatgtcctgtaggccggaacattcaaagtacaattggtccaatatttgaaatcgcccaatctgccttggaaaaagctcttgggcatatcacaattgaggatgtggtaaaggatattattgaaaaagaaaaattgaccaataattgctaaatgatttcacagaaaatcttttatcagactgggaataaaaaaatggctttttcatgaacaaaaaaagagcagacataaagtctgctccttttgatgaaagatttagattacggtaagggatataaatatgctcatgatacagaggaaaaattaacgacaatgcagacgatgccagattctttaatagggcgtgagtattactatccaacaactcaaggttcagaagctaagttcaaacaaagacttgaggaaatctcggattggtataaaagaaaccgcaaatcttagtttgaacgaatatgttctgtatataaaaataatgaggtatggggtgaattgataatgaattatgatggaataaaagattactgcctaacctttccaaactcttatgaagaccatcctttcggagatggttggactgcaattcgtcacaaagggaataagaaaatatttgcacttatcttcactcgcgacgaacacttatgtgtcaaccttaaatgcgaacctgaaagggctgattttctacgtggtctttttgaagaaatcaagcccggataccatatgaacaaggagcattggaatactcttaccttagatgagggactcccagagcaccaaatccatgacatggtaaagtacagctttgaactgacaaaaccaaaaagtaaaaaggaaacataacatcgaaggatagaacgctcattatagatattcatccggtgcaatggtacagaggaatatgcaaaaacttcaaggcagcaatgtttaaattcgtatttacgagatgattttttcgttattgttagtcctttgtttcttgacatgggttgaacaaataaaaaagagcagactcaaagtccactcaattaattaagatgattgctcatttcatccagacatctataaaaaatgaaaggtgacgatgatatgccacaaaggtcatttagcgtttaattaatactgataactcaccttcaaacactttttcctctttctgattataggtagataacaatacagtaagtatccccgtctggcttttatttggttttttatcaataaccttaacaatagtgttcagtctatcattagggtaaacgggtgctaggaattttatattattcattcctgtcccagcaataatatcgtcttcatgacgcccttcttcaatccaaagcttaaaagtaatagataacgtttgtattccagaagcaataattccattaaatctgcccatttttgctttttcttcatttaaatgcatgtattgtgggtcatacacttctgcaaaattcattatattctcttttgttaattcaaaagatttagtttgaaaaacctgcccgatggtgaattcatccaacttcataaataaatctcctagaatctaaactttattattaaatctacgtagcattttaacatactggctctcacacaacaacttaacggtaaaacaattgttcccctatcaggaatgaacaagcacattgtttttgtttccttgcctttaacctctttataatcaggtgttttcttataaagaccaaggcggtcgccatcaccatcacccggcatatgtgccatttcctcataagaatctccaagcttctcataataagaataagcagtcagcctacgagaactttcttctggctgataaaacacaagttgaatatatttcccgtcatcatatacacgaattatggcgttatctcttttgtgctcatctgaatctgctcgcatttcttttctgactttcttctcctgcttcatcacttcattaatcattatcatatttactaccgccgcacgcagtcagcagaaggatgaaggtgactgacaaatcatacgacctactataagtaagtggacagtaacagataagtttctataaacaaaaaataccaagggtgtcaaaacccttggtatcattgatgcggccgagaggacttgaacctccacgggttattcacccgctgggcccgccatctatattcataaaactattgctcagttgtcagcatgttaagtaaattacgaatttccttgttataacttttaatttcttcttcattacaaccggttttatcaaatactgcattaggtatcattgtgactttttctttaaactcattcccttcagttgttaacgtaataattacacttcgttcgtcctcttttgaacgctctcttataataagacctcgctcctcaagtcgttttaaaactggagttaatgttccggagtctagatataattcttcgcctaaacctttaacagatattttttccttctcccataaaacaagaagaaccaaatactgtgattaacgtacaagttctcgttttctgctttggaccccatatagaaaataaaaagccagctctccttcgggagaagaactggcataacaaagcttcttgcttcttattttgctgtattgctcggaccttttaatatctcttcgttcttgcgtcaatgttttattattaggacacaaccaataaaataatgacgatcgagaatagcaacgctgcttttgcaaagcagtaagccctccagaatataaaagagctgcagttcttgctgctcggataatcccagcttattctgagtctgtatttcgagtagccggtcaattaaatggatgtttttttcattccttttctgtttgttccattttccaccacagtgcatcttttggattttcaacagcttcttgaaactcagccttagaagcaactgttgggtaagaaccttttaaagatttacctgaagtatctttaaataaggttaacacaactattaagccaattaaactaactgctaataaatagaaacccggcgccaaattgtttcttgtcacatgggttaaccaagaagcaactaaaggtgttgttccaccaaaaatagaaactgataagttgaatgtccaggataatgtacgatatctaatgtcagtatggaacaacgtaggtaaagatcctggcatagtgccttcgtatacagataatacaatacctaacattaaaagtcctataaataagaatgttatattccccatattaagaaattgaaaagagataatcgaaaatacaattcctaatactaatccaattgatataacttttttatttcctaatttatctcctagtttaccgaaagttaaagcgaacggtaccataataatcaatacaattgctgtaaccggtgtacttatattatcacttataccaaggttctcatctaaataagaaggcatataacctaacaataggtaattggttatattgaaaaacgccacaaatacgatacataaaaagatatcttttttatatgttttaatgacttctaataaaccgggttgttgttcttggttttcagagatgtcattttcaaagattggtgattcatctaaatgacttctcaaatataaaccaaataatcctattggaatacttaagaagaaaggaattctccatccccaactattcatttgaacatcagataaagtccagaaaagtactgtaactaaaacagaagctactatataaccagataatgtgccgatttctaaaccgctgcctaaccttatacgcttattatctggagaagattctgcgatatataccattgcaccagcgtactctccacccacagaaaaaccttgcagaatacgagctaagagtaataatataggggcccatacaccaatctgatcataggtaggaagcacaccaattattaaagtagataaagccatcattaaaatagtaattgttaatactattttccgaccaaatttgtcaccaactttaccaaaaataattccgcctaccggtctaagcaaaaaggcaattgcaaatgtagcaaaagtaaatattaactttaattcatcgttttgaactggactgaaaaagtttttactaataataactgccaaataagaatataaagcaaaatcaaaccattccatcgcgtttcctatccctgtagcaaacacgcttttcttcgctttttgaatgtctacaacgttaatttttttcttgttaaacttcatttaataatatcgactccttaattatcaaatccacattatacaagcgtataaacggtccaagcacgcagtcccagaatgtatagcgtaatgcttctctaaaagtctgggggtttctgtttcacctgatggagagctaacggcatagtggatgattggttcaactgtaccttaaaagactcgactaatatccatatcagccaaataacattgtaaaccaggaaagaaggatgaaattaagtgttttcgctggtttccttaacttatttttgccgattggactaaaaataatacaaaaagcaacaaaaagagaaacatccaacagataataccagccaaagcggttagtgatatatccgtgggctgtggttggtattttctgcagaatatttggagaaatgattccccttaatacagctctattgtgaatattatcacaatcaaaaaaaattttatttcttcaaagtatcctaaacctttattttagttcttccgtcttccaatatgtttattataagattgaggtcgttccttagaattatttactgattctatctttattaccccacaatcaggtgaaacaaaacactataaacgtaccatatctttttaaaatctgacaagcccaacagggtgatagaaacccggctaaagcccagctagtcaatggatagaagaaatttttttgtttttcccaaggaataaccgtctgcgtttaatccagcccaattagaaagaaaaagagcaggagtaatcctgctctttcattcaaaactttaatttgtatgaagaatttcgtataccttttcgactttctttacctattaatcagtatacagactacaacagaaataagtagcaccgggtatgaaataatggatgcatttaaacaggccaatcaccgacaattgaatttattgcatgacacctaacaaaattattttttaaatccagctggaaataaagaaacatttcttaggtaatggttttatttttggtaaatcgacatgtatttgtttccctttccctgtaatccaaatgtttcgatatgaacatttaatcctttcatacatttatcacaattttaacaaatttttaactgaacttggtaagttgaacaaagattaaacattgaattttgacaatcgcaaactgtcatatgtgtccgtcatatcaaaagaatctctttaatgtgttgtttagtgctttcgttacggcgactatcgacaaataagaccaagcaaagtattgtccagatagtttgagtattttgatcactttgcaataagttattgaaaacacactacctaaaatcactgcagccaatagacaccggctgattttcatcaatcatctccccttttttaattttcgtagaaagcattaagcttcctcgttcatgaaaataatcagcgacttcaatcgaaaaattttcaacatcagcaaacattttcctcgaagtcttggttttcttccatgcttagcagcactttctctgcttttgcaaattggagtttgaggcattagtaactatctataaataatgaaaatatttgtgcgatgtctactgcaaatgacttactttaggtaagcgggcagtttgtgggcagtagatcatttaaaaataagcacaaaaaaataccaaggatctctataacccttggtatcattgagatgcggccgagaggacttgtacctccacgggttactcacccgctgggccctcaacattgtaaatccgtatcactgattatgaaagcttgttttcattacactttctaacaccacattacatcatttctataggtttgaatgaattatggttaataattggtgagaaaaaaaacccccttaattccccacttctcgaaatctcattacgttcaattcattacctcttcttcaacaattttttcgaacttcacatcctatccatggtaatatttagatataaacttactgaaaggattgtccaatgaaagtatttgaagcaaagtctttgttatctgaagctgaaaaccgagcaaacgattataaagagttgaaaaatcaaatgattaatttaagaaaagcctttacggcagttgctgatcttgatgatagtgagttctctgggaagggagcaaacaatattaaagcattttttcacgatcacaccggtgtagctgatcaatggattgatttaattgatatgaaaatcgctttccttactagcatctccggtattctggaagatgccagcttatctgatgcatatatcgaagaatccttcttagaacacgaactggcaaacgcatatagaaaatcacaagcaattatgtccgagcagaagaaagcaatgaaagatatactgagtgatattgatgacattcttccacttgatttattttcaacagaggcttttaaggatgagctctcgtccgccgaaaacaaacgaaaaaaaactattgagaaaataggcgatacagacgagaacttaaaaactgaatatgcaatgactgaacctaacgaacaatttattaaagcagactttcaaaagttacaggagtcaacaggtaggggcaaaaacgcttcacctatacattataatgccaaggcttatcgcgagagtgacatacataagaaaaaaggcgatatcgaaaagcggtctgaagcttatttaaagctcaaaaaagaggaagctaaacaacgcgaaattaaagatttgaaaaaacagcttgtaaatgtaacagatcctgacgagtatttaaaaattgctgaaaaaattggatacgaaaatttggagcctgaccaaaaagtttatttccgccagctcgaagaacttcaacaaaaagccgaaatcggaaaaggtattgcagttggaatgtatgaagcaggtaaagataccgtgatgggtctctatcaacttgcaatgcaccctattgaaacgctttctggaacggtgaacgccgtcttacatccaatcgatacttataagatcatagcaaaagacatagaagacactttccaacgtgatatgattaatggagatagctacagcagggcaaaatgggtgtcctatgtcggcagcactgttgttcttgcaatagttggtccaaagggtattgataaagtatccaaagttgcaaaagccggttcaaaatttgctgcaattaagacacttgaagtttcaaaaacaggaataaaaaaagggattgaatacgttaaaataccaaatgtttttgaacaacaatatgcaatggctggcggttcagggacttttcctttcaacacaattgatggggagagttataaaaactctgcacttgaagtttttaagaaccagtctgctacacatggtataaaaaaagcaaagccgcatgaagttgtaaacgaattagagacttttcaaagcaggaaatacatttttggaggacaatcatttctcattgataaacgtggaatgaagcatattttagagcgccatcatcctagtttatgggatggttcagttaagtctcgtcaatcttttctcaataaagagatgactgttagcgatgttgcagatgcgatagaatcaatcatgaaacaaaaccgtgaagagttagtacaaaaaggaacaaaattcagttatcaaattagaggaacgtataagggtcagcaatatgttgtaggctttcaaaaaggaagagtaggtcaattctatccggaaaaataggagaggtaagaatgttttatatacaatcattaattctcaagccaaataagaagataaaggatctttcagtcttaaaaaagaatgttaacgattactttgtcccccttaacaatatagagggactaaagagcataaaaccacagttagactcttactatttatgtggggcgattattttaaaatatggtgaacaagatttgcttgatgtcactatgtgggacttggttgaccaattgtgggcttattttttaaatctaattgaagaagctattgaaacgggaaaaagcgaaacttattttccagatcaaccccttctattgaaaatgaaatcaatatcgaatgatatgttgttatttgaaattgaccaaaaacaaaaagtattactaccgaaacttgatttttttgaatcacttttaaagaatgcgaaaagtttctttgaaactatgaattttgttttagaagaaaactgtgattatgagtatgaacttaataagatcgatgaattgcaaaccaaaattaaatgtatgtgaggttaaatgtgaattactctggagtgaaaaagttctttgaagagaataaaaaatattcaattcttactgaaagcgtcactgataaacaaacctttttcatggttagcatccacgcattttcttattttatccatcaaaacaaaaattttctgctgaaaaatccctttagggcattgttcagctgccttttcttatggttatttattctctcacaaatagcacaagatagtggataaaaagatgaagagtagcaacttgcctactcttctttttaaatgggaaatatttaagatagaggttgggttttccgacccactcaccaatataaattacatccaaatagcttgcccaacaacactttttattcgacctaaccagtggtctccaattctctctaattctagtatttgatcatcattcgcgtcagctaaatccccaactgttttgaagttactactctctaaaatttctattcttctagaagttaagccatacggatatgcatttgattttttaagcacagagattggtttttctaaaatccctagagacccatttccttttaattcaggaagaattatattatctaatacacctcgtttatatatttgaggatattccttttctatactattccattttttgaataaatccgtcgtgagtctattccccgggataacttccaacaaacttgataaattcaaaatatacctagttcctcttccaccacttttcattgctctggatgaatctcgttttacaataaaaccagcatactccattatttcgaaaagtttttttagccgttcaattacatctcgatgaattaaacaagaaggaccataccccggcctgtccacaaagtaactaacttctttatataacgtctctgtaagctctctagtaggccttattaagggttcatattttccaagcttcggttctaattcttcaagtaagggccagtagtattctgttgctaaatgttttaatgttgcttcaatttcacggagcccaattacttcatgttcttccgatatttcaataatgtgattaattgcataaataaatgctctaacattacccgtaactgctctaccaacaaatcccgaaaaatcctcaatagaaacttttaagaactcttgaagcgaggaatttgaataccgcctttctaatatttccttaaagaatgacgtaaaagatgggttttcctcattccgtgaaatatctattactgttgcatcattaagcaaatcaaatctagaaccgaactctgtaacacctggataaatagtcgctttacatgaaatagtattgcttgataaagttctgaagatatcaaaaaattcttttaaagatgtttctctacctatatgtgcagcatcatcgaaaaacagtattatacgtttttcaattttctcagatagattcgtaagttcactttgaatagtcccgatctctgaagcaggactgaaatcatcaacaggaatatctatatacttgtcaatagcaattcttattttatctattagtaacttacaaaatatatcttcataatctttcccttctgccctaagtaagggaaggtgcctaacgctcacataaactcccagaacattttcagagagatctccttcattcgatctaaaataagcttcttttaataatgcactttttccacttcctcgccctccccttataagtaccggtccatgagctattaattttcttataattttattttcgtacttagaaaaagtatgatatttacgaaactcttcatctggaaaatcttctgctgccaatattaatttgctatcaaataaatcactcataatgattctccacccaattatataatttttgatagattacaaaagcgttatcataaggcaaacgacaaatacaagagtctatataatgactaacaagtccaataatagaacaaaatttcacagcatctaataataattcgactacagttgatttatcatatattatttctggtttaatcaaaaattcactatgtacccccttggaaagggatgaataaattttagacgatcgtgttcttaaaaactctgtgaatttatctgggtcaactgaacttcggtaataatctaatgattcatcatcttgaatggtctcatcatcaatcaacatctgataagcaggattccaaaatgtatcaccatatgcatctccaaagaggcctcgccctaccttttgaaattctttatctgggttccatatagcaccgtttgattttttttcaaaaacatcaccattccaatttatcgctccacttgatttcttaccaatactatagctatctaaagattgaattttgtgcacgtaaatcaatctaaaaggatcaaatcttcctattaaagctgaacatgaagattccaatatgtttcttgcataaaaagggcctaataaggtcaaatcatcactatcattagttagcaaaacattaattcttgtttccatgttttttatattattaaagagtacatcatacagactttcaattgatttatgttgagcatagtcaccacaaatcaatcttgctagatcatccataatttcataaatcctccatgttattttagatcaattctaccacaattgaggttaaatgaggatgaccttcatttctaatttatctcttcttgtttctaatcgtctattacaaaataaccgaattccaaaggaagtttactatgtggttaatgataaaattttctacagggttgcattttatacataaaaaaataataccaaaggtagttaaacccttggtattattgagatgcggccgagaggacttgaacctccacgggttattcacccactaggccctcaacctagcgcgtctgccattccgccacgaccgcgtgctatgaagctgtctttccactaagcatataagctagtgatgatgatcagcactttgaaaataaagtgcgggtgaagggactcgaacccccacgtcgtaagacactagatcctaagtctagcgcgtctgccaattccgccacacccgcgtgacaagtggtgagccatgaaggactcgaaccttcgaccctctgattaaaagtcagatgctctaccaactgagctaatggctcgctctaaaagtgaatcaaaatttttaaataaaatggctgggctagctggattcgaaccaacgcatgacggagtcaaagtccgttgccttaccgcttggctatagcccaacgaaggtaaatggtgacccgtacgggattcgaacccgtgttaccgccgtgaaagggcggtgtcttaaccgcttgaccaacgggccgtctggttgagaacttatctggcggagaaggagggatttgaaccctcgcgccgcttacgcgacctacacccttagcaggggcgcctcttcagccacttgagtacttctccatatggctccacaggcaggattcgaacctgcgaccgatcggttaacagccgatagctctaccactgagctactgtggaataatcagactttctttattataaatgatgcgacatattgtgtcaagaagcaacatttatttttttgagaaagtgtcgttgtctctcaacgacttttataatttaacatagaacattaaaatgagtcaagcctttttaaaaaattcttttgattttccctctgcattttccgcaggcatatctttccgggttcattgcccgcttctttatatactgttggccgcaggccgcgcatctatacatatatgttttcttttgtggctttttggtttgcagcggcgtgcagaatctcggcgctccgactttctgaagcagttctctgaagtccttgtctctgtgcttgtacccttttccttcaaggtgaaggtggtaatggcacagctcgtgtttaatgattccttccagctcgctctgcccgtgttcgagaagatattttcggtttaattcgatgttatgggaagacagcatgtaccgcccgcctgtcgttttcagccggtcattgaaaaaggcccggtgacggaacggttttccgaaatcttgtgcagagatgtcttccgtcagcttttgaagttgttcgttatccataagtgcaccccgctttaaaaacattgaacgggacaattcaccgttcgcatacaatgagttaaaaccgacctctaactaaaagctgaggaggaatgagccatgccgaattggctgatgaaacaaatgcaaaaagcgtttttagaaaaggacaattaccaaatcaaactgctgaaccagtgctggtatttctacagaaaaaaacactgctcgtaagcagtgcttttattttaccatagacagcgacactctgcctttttgcacgtccaccccttcgacccatacggtgacgatgtccccgaccgatacgacgtcgagaggatgtttgacgtattgattgctcagttttgaaatgtgcacaagcccgtcctgtttgacgccgatatcgacgaaagctccgaagtctacaacgttgcggacggtgccctgcaattccattccttcctttaaatcctcaagctgcagaacgtcttttttcagcaaaggcttcggcacttcgtcacgaggatctcgctccggccttgtcagctgcccgcaaatatccgcaagcgtaatttcccctataccaagctcttcagccgtttcagacagcggcagtgcgcttattttctcttttgcgtccgcgcttccgatctgatccgcagtgagctgcagttttttgagcagcgcctttgtctctttatagctttccgggtgtatcccggtgcggtcgagcggctccggtcccccaggcactctcaaaaagccgatgcactgttcatatgtttttgcgccgagacgcgggatttctttcagctctttgcgatttgtaaattttccgagctcttccctttttttaacgatattaccggcaacggttttggataacccggctacatattgaagcagcgcggctgatgctgtattgacattcaccccgacttggttgacgacggtctctacgacaaaacggagtgattcatttaaatgcttttggctgacatcatgctggtattgtccgacgccgacggatttaggatcaattttcacaagctcggccagcgggtcctgcaacctccgcgcgatggagacggcgctgcgctcttcgacctgaaaatccggaaattcttcacgggcgatttctgacgcggaatacacgcttgctccggcctcattgacgatgacataataaatgtcccgctctgtttctttcagcacatcaacgacgaattgctctgtctcccgtgatgccgtgccgtttccgatcgccacaacctcgacttcgtaccggtccagcaattctttgatttttttccgggcttccgctgtcttttttacgggagcgtgcgggtaaatgacgtcgattttcagcacttttcccgtctcatcaacaactgccagtttgcaccccgtacggaaggccggatcgacgccgagcacaactttccccttcatcggcggctgcagcaggagcttacgcaggttttcagcgaaaatatgaatcgcctgcgcgtctgctttttctgacagctctttgcggatatcgcgctcaatagccggctggatcagacgtttgtaactgtcctcaatggcttctttcagcgtttctttcacaggcgtttcacggtgtttgatgatttgcttttctaaataagcttttatctgatcggcgggcggttcgatcgcaatctttaaaatgccttctttttcaccgcggttcatcgcaagcactctgtgaggaacgaccttttggatcggctctgcgtactcgtagtacatttcatagacgtttttctcgtcatctgcggctgacttgcctgccgcggaagtgagaattccttttttatacgtttcctggcgaatccactttctgaaatgaggatcatccgagatttgttcggctatgatgtgcttcgcgccttcaatggcctcctctcttgaagcgacttctttttctgcactgatatattgatcagcgatgtcgtgaaggcggttttctttcgggagagaaagaatatagtccgcaagcggttcaaggcctttgcttttggcgacggtggcttttgttttccgtttttgtttgaagggacggtataaatcctcgacttcctgaagcttgaccgcttgttcgattttttgcttcagcccttccgacagcttgtcctgctcagagatcaatctgatgacttcttctttccgctgcgtcaggttttgtatgtattgccaccgctcggagattgcctgaatctgcacctcgtccattgagccggtctgctcttttcggtaccgcgcaataaacgggacggtattgccgtcttccagcaggcggatgacactttcgacatgtttttgggataacgctgtttcttcagcaatttgttttttcaaaagggctaacgtttccatatcacaaaagcctccatctcttcattctttctctagtgtatcaaaaaacggcggaacataaaaaaagcagccttacgataaaagctgccctagaatataggtcaaatcatcacgtctggatgttgtgtacggatgaagtgattttgatatatcttctattgagtgtccctgctttaagcaggtgcggatatgcggaacctcaagcccatccgtgtagatgatgaacctcgcccctttttcgtatgatgacgtatacgttttgtatctttgcggtttgcctgagaggtaacccgaaatcggcagcggatgaaagacttcgcctgatggggagtgcaggaagaaacggacattgccgatcgagcagtatgtcaattcccttttgatgaaattgatttttaagatggaggcagtcgcccctcttttgtttttcatcgcttgattgcagcgctcaatgatgctttccacatcctcatccgcatacgtttccacgatgtctttaatggctgacgaggattcgttggcaagagatccgctgccgagaccgtccgctaccgcgcaaactaattcttcttcattcgccttcataaaaaagctgtcgccgcatatggacttgccttctttatttaattggtatacaagagtttgaacatgttcattttcttcaacctgaatcattacattagctccatggagggatctccaatcaaggcctctctcagttttttcaccgctttccgctgcaggcgcgagacgtgcatttgagatattccgagaatgtcccctgtttctttttggcttttattttgcacaaatgttagatcgataatctgtttttcgcggtcggacagcacatgaagcacgcttttgagcatcatctgctggttgacgcgttcgtatccttcctcctgcgacccgacgatatctaaaattgtgacggtgcttccgtccgcatccgcttcgatgctgtgatcgacagacagcgcctgatagctttttcccatctccatcgtttcaagcacttcctcttctgacacatcgagaaaggctgcgatttcttcgactttcggcgaccgctgcgtctctgtcgtcagctgatccaccgccattttaatgcgcggcccgagttctttaatccgtctcgggacgtgtacgctccatgttttatctctgaggaagcgtttgatttcgccgatgatggtcggaatcgcaaatgcttcaaaggatttgccgacctcgggatcataccgtttaatggctccgagaagtccgatcatcccgacctggcggaggtcttcatgaaagctttttccttttgaatatttctttgccagcatttcgacgagattggtatacacctcgacgagtgtttcctgggcttctttattatcatgtgtttgaaagtcgcgtatgagccgatcaacttcatctttagttagtttcgtagtttttgatggttgtgccatgatcaactcgctccccatttaaatactttgtcatcgccacggttacgccagagttgctttgaactttgacttcatccatgagcgtttccattaaatacagaccgagccctccttctgacaattgatcgactgtgtgcgaaggtgtgtacggcccgagatcctgctgcttctgatcaaaatcaaagctgtctccctgatcggcgacaatgacctccagccgatcctcaaacacaccgaaccgcacggatacttctcccttattttcatcattgtatgcatgctggacagcgtttgtacaagcttcgctgacagcgatttttaaatcttcaatgtcatcataggtatagcccattctgcttgcgacacctgataacgtaagcctgacgattcctacatattccggttcagccggaattttcatctctatataatcaactgatgtactcattgcacgccaccttctgactttgccgaaatgtcgatgatgtccttaagccccgtaatttcaaacagacggacgagccggtcggaaagattctcaagcttgagagagccgccttccttgctcaccgttttaaacacgcctacaaaaacgcctaaacccgtactgtccatataatttacatcttttaagcagattctcatgtccttcccctcgtttgccaggggcatcagcttttcacgaaccaccggagctgagtatacatcgatttctccagcgatattgatttgtatatctgaaagattctccttcatatctaccgttaaattcatcgtatcacctctgaaagttatccttactcgtgctaatggctttttacccgtgctgctgtttttttaaacctttcttttcaaaacaattaacgtaaaatcgtcatgaagctgaaagtcctggagtctcagcaggctgtcgtaaatatttttgaccatatcctgcgcggagcagtccatatgttcttccagcatgcgctgaatgtcactgcgttctaagaaaccgttttcggtacggcattcggtgacgccgtcagaaaaaagaacgatcatgtctccttcgtccatgtgctgttcatattggctgtaatcaaaatcctgagaaattcccagcaccaatccttttgcctccagatcataaaactttttttctttttcagagtagtagaagcccggttcatgccccgcagaggcatatgtaaattggtgatttttcgtattgtagtttgcgtaaaacatggtgataaacatgcttgagtccacgttctgttctacaacgcggttaagatttttcagcacttgggaggggtgaatgccggtctccggaagagagtccatggcatacttgatcatcgacatgcacaatgcggcgggtattccttttccgatgacatcggctatcgcgatgttaatcgattccttgtctttgacaaagtgataatagtccccgctcatctgtttggcggggacgctgatcgccccgatatccagatcttcttcttcaggaatttttgtgccaagcagcgtctgctgaacatttgcggcaatttcaatttctgaacgaagctcctgctggatatctctcagactttgatgttcctgataagccatcccgtagccaatcatgacttctattaaaaaatccagcgaatgaaaaacatcttccggcagatccggatacagttcctttactacttttcggtggatgctgatgatctcctccggaggaacctgatgttcaatcgtttttcggctgaatttttgggcttgatataaagatgtttctgttaattcggctatatatcggctaagcagctgatgataccgctgctctataacctccctgaaatccacgttctaacctcctaccgaagccatttcacggcttgaatctctgttccttcctctgcaacagattgcaggctgaattcgtccatcagccttttgacgcccggaaggcccgctcccagtccgcctgacgttgaaaagccgtcttccatcactttacggatgtcggggattccgggtcctttgtcttctgctataattttaaggccttttttccctctgtcgtttacttgttctatgctgacctggcccttgcctgcatataagtaaatgtttctggccaattctgagatagccgtcgtgattctggcctggtccaccgtgccgaagcctaattccttcgcaacgttgcggccaagctgtctggcggctacgatatcccattctgtcatgattttcacacaggattggtcgttcatcgctattcccccaattcccgcttcaatgtctcaagcccttgctctaaatcgagcgctgtttcaatttcctcaagtgagattccgagttcaatcaatgtgaccgccacagcaggctgaattcccgtcaatacgacctttgcgcccatcaatttagacatggtgatgacatcgccgagcactttcgcgataaatgaatcgatcatgtcaacggatgtcaggtcaatgacgaccccgtttgcgccggtttcatagattttgttcagcagatcttcttgaaaatgcaaagctgtctggtcgtcaagttcccattggatggataccaataagcagttatacagtttcaggatcgggatttttggatgtctcacaatgttattcccccaatgaaacgatttttcgatttgtcatttcaagcgctgtttgaattcctttttgaagggtattcttcgtaataacctgcgacaaatcaattcccagattaacgatcgtctgcgcgatttccggacggattccgacgagcaggcatttcgcgccgacaagccgcaccgcttccgatgcctgaataatatggtgcgccaccatcgtatcaacgaccggcacgcccgtgatatcaattaatacaacctgtgaacggtgctttacgacgccgtttaacagattttccataatgtgctttgcacgctccgtatcaatcgtcccgacaagcggcatgaccgttacatgctcaaataccgggatcagcggagccgacaattcctgaagcgcgattttttgcaaagtaaccgtcttttcccaggagatagaatactgatttaaaatttccgtgttgatcggattgaaaaagctgtctatttccaaaatcaaatctgctctgtcctgatcggccatattaaggtcgaccatcgtttcgtaaagcagtttccaaaactctgacagggtggctgaaagaagtttcagtgacaggccgagctgaacggcgcgcagtgcgagttcactgatctgctcttccgtagcctcgtcatttttagtcgataataaaagaatgtctatatagtctttacaaatattttcacatatgtgattcgtaagctgatagtcttcctgattgcctacttcttttagtttggctgtccaagtatcaagcagttcatcatgctgatcaatgatgaactggtacactttctgattcgacatgggtttcactgacctcccgacacaaaacaacaaattttgtttgattatctctttattatagcgcttatgtttttcgaaaacaaaaaaagttgctccatatgagcaaccaaaatatgactaaaaatcaatgagtgccaaactgatttgcaaggcttcatcaaccttatccatcatttcatcatccagatgagttattttatccgttaatctttgcttgtcaatcgtccgaatttgctccagcaaaataacggaatctctttcaaaaccgtagcgttttgcatcaatttcgacgtgggttggtaatttcgctttctgtatttgggctgttatggctgcaacaatagcagtcgggctaaagcgatttccgatatcattttggatcactaaaaccgggcgtacgccgccttgctctgagccaacaacaggagataaatcagcaaaataaacatcgccgcgctttacaatcaaaatgattatcctccgctgactaagcgctcaacggtcgtttctgcttcgcactcagcatagtgagcctcagaagagatattcaagttgattttcgccatttccatatacccgcgtctcatcaaatcacggttatggcgagttgtccgttcgctgacatacgctctcactgcttgtgatatcagttcgtttctgcttcgtttctcccgcatcgctacaccatccaattcagctactaagttttcaggcaagctgattttcatttcggttcttgcgctggattcagacaaaaaacatacacctccaccaaacttacggatacgaccaatacatccatccagacataatgataccattattcaaacgtcaagcaaagctgttttataaattctctttttccggatgacggctacttgtttgtattatcttgcagtaaaggatttcttacttccattatactctcattttccaaaaacatacggggaacgcgggaactaatggtacaagggacctcgtaattaatcgtctcaagccgccctgcgatttcatccatcgtgatcgtttcttccttctggctgccgatcagggtgactttggtgcccggcggataagattgatctaattcgaccatcaattgatccatgcagattcttcccgcgatgttcatccgtttgcctccgatcagcacagacgtgccgctcagcttgcggagccacccgtccgcatagccgatggggaccgttccgatccattgatccttctctgccgtatatgttgcgccgtagctgacgctttcccctttgcggatctttttcacatgggataaaacagagtgcagcgcaaaagccggttttaaatgaaacggaatttcgctttggatgtcagcagaaggacgaagcccgtacatactgatgccgaaacgaaccgcgttaaagaagccttttttaagacgaagtccggcagcgctgttcgcgcagtgcaccatcaattcttttaaagggagcggagcgatcaattttttaaagcggttaaactggaagaggaaataatctctgtttttctcatccgcggtagcaaagtgggtgaatacgcctttacagactaaaccgggattttggctgaggatttttaacacgctttggatttcttcctccgttttgactccgagtctgttcatgccggtgtcgactttcagatgaaacggcactgttttacttccgaggtggcgcgcagcttcctgaagccattcaacagaataccccgtgagtgttacgtcatactcggcagctgcttgtacatattcgggcggcacggcgccaagcacgagaatcggcgctgtaatgccccgtttcctcaatgaaattgcttcatccagtatggctacggcaagacaagaggcacccgcttcaagcgcggctttcccaacttccaaatctccgtggccgtaagcattcgcctttacaaccgccatgagatggacgttttgcccgatgtgttttttcatatgcgtgacattttctttaatcgcggacaggttgatttccgcccacgtttctctgtaaaaggatgctgtgttcattcgatacacttcctagcattattttcaattcatattgttattatcatactaaaattattctgcaaagtgaaatggaatcaaaaaagagaccgacagcggcggcctcttttttgacgttattttgacgactgtccctgcatgcttttggcggcggccaccatttcatcttttgtcagatcctgtgatgacagaaggtaatccactccgtcatatgtccacgttaaagacgcatcagataatgcggccaccgtgaagccgagattaaccggttcgcctttcagcgtgacggcagaggcggcttttgcgatatgggctttttcttgaataagggtgaatgatttttctccgccgtaagtcatgacgatccgtttgccgtccgccgttgaaatatctttctcttcaagctttttgacgccggccggcacttgaagcggtgttttgaccgcaaatgaatcagacggcttggcgcttgtggcgacgtccatctgggaaagcgtcatatttttcttctcgtcaaaagagtctttatcaaacggcttgttgaattcaaagcttttgaattcgactttcaccatcactttccgatctgtatccatgactttgacgagcgatgggctcatgtcctttttgttgaaagtgatttcctgagtcggcagcattttgttgtgctgatagtttgtttttgtttcaaacgtgtactttttatctttggcggaatagacggcgtctttgtcatgctgcacgtcctttacaagtgactcaaacaaatatacttggctgctgttattcggccagtcgctttggaagcggaagctcttatttagagacggcgtgaggacaaagactccgttggcgttccgtaagatgacttggttttggtcttttttcggattttccaaatagacccggtacagggaaggttttttatgccagatttccacattgtatacttgcggatcactccccgtttcgatggtcattttggctttcgctttgtacgaggtgtattccttcgccttcttatctaaaccgttcacgatatcttcctgtgatttttggccgcaggccgaaagaataaggacggcaagcagtcccgttaaaagcaaaacaaagctttttctcaccttttttcaaccccttcttctcaattgatgtaaagggaagaaatcgcttgtttgactttaacggtacgccctgaacggacggacgcgtaccataaaagcctcaaacaacttgtctcccttaatgcactatcaaatatatgaaggggttccggctaatatgcagactagcgtgacaacctttcaatcacgacctgtgccgcggcgtattcttttgtatgggtaatggagacgtgaaccgccgcgccgtcaagcttggcgcaggccagcacaggctttcccgctgtgtcgtttccggtttcaatatcctgaaagctgagctctttgccgatacctgtgccgtatgctttcgaaaaggcttcttttgccgcaaatcttcccgcgagaaattcaattttccttttgtccgacagcaatgtaaaacgagcgtattcagcctccgtcaatattctttgcggaaacctcgcctgccggctgagcatgttttcaattctgtgcagttcaacgatgtcgattccgattccgaaaatcatgtgaattcctcctaaaagtccgtactaaaaaacggtttatgtcataaacgtgttactatatatgtaacaaatcagatgcaaaggggcttgcgatgtttatacgaacggaaaatttccagacttttatcagacgttatccggccgtcagctgtattttggcgctgcaggcgttcttgtggctgtttttcagtatgccgcttcattccgtcatgatgtggtcagatgctgtgaccggctataattacggcgtttcctcgggagaatggtggcggctggtgacaccgatgtttttacacgcgaatttcactcaccttttgtttaactccatgtctctctttttattcgcgcccccgcttgagcagatgctcggaaaagtccgttttctgattgtgtacactgcatcgggcatcatcggcaatatcggcacgtatcttgccgaaccgcttgattatgtgcatgtcggcgcatccggcgcgatcttcggacttttcggcgtgtatgtgtttttgactgttttccgcaaggagctgatcggccgggatcagtcgaaaatgattatgaccctgcttatcatcgcggtactgtcgacgtttatcaactctaatattaacattatggcgcatttgttcggactggcaggcggatttttgctttcctttttatgcgtgcagcaaaaaaagcggcggtattaaccgtccgctttttcatatgaataccagcgcccgatgcgttcggcatcttcctcgctgacatccttcagcatgacatgctccatgtggtgagctgatttcactgcggtagccacagatgcgagccgccttcttttttgcagaaaggaacggctgacttcaaacatctgcattcttcttctcagcataatcgtggtcgtcttcccgaccagcctcgtggtgatctgaagcctgccgccgtttatgcaccatgacgctgtcctaaacgaggcatatccaagcaccatttcgacgggaagcacaaggagcgatgcatatccccacggtttaaacagaatacaaagcgggatgatcacgaaaaccgagaagattatggatcggaataaataccggcgcagcgcccttttcggcaaatgattccggttttcttccagcacgtaatccggtgtgaaaccgttcagcatcactccgagctttgatttgcggatgatcggaaacagaatcgtctgtgctccttctttctcattccccgcactgccggcgctgacaatcgcaaccgtcgcgtatccgaataattgcctgatcacattttctttcattttaatggcttggattttacggagcgggatcgtcacttgatgtttttcaataattcctctggtaatgaccaattcgtgttcttttttttctatcttaaagttggcatgcttgatcatcataccggcgatgcttaacagccatgcgatgaacaatcctatgaaaatgatcacggcgtatatgccgatgctcgcatgcttgagaaaggagaacctgtcatagagccagtccatcggaagtacttcatcaatctgagaaaagagggcgaataccgctgagatgatgacaccgattcccccggatgttgaggcggccataagcagctcacctacagacaggcggtaaacggattgcacatcttccccgcgcatcggctcctgctccgctgcggtctcccctcgttcttcttgctccgctttttgctgaaaaacagccgctctgatccgttccgcctcttccacagtaatggcggataagacagcctcggcgtttttcccgtcgccggccgtttcgatttgaagcttaacaagcttaaaaagctgctgaatgatgccggcactcgtattcattgattgaatccggtcaatggagatgtatctctttttcgtaaaaaacaagccttcttcaattctgaattctccgtcctcaatccggtatgtaaattttctccactcgatcacactagccgtaatcagccagataagcaggacggcgagcgcaatgcctccgtaaaagcggatgaagtggttggaattaacaatatagacgagaaaaaatggcagaataatgtttttaatggtttcgataatagtatggaataagttcaaaatcacggccgccggatgcagacgtttcggctcagacatcatcttccgtcacccttgccagacgggaaatggaatccctcagccggtcagcttcctccatatcaagcgccggaatggaatgaacggttgccgccgtggagattttgactgaggccagacggtaccttctgaggagcgggccttgtgaagtatctacgtgctgcaccctcaccatcggcacaatgacccgtttgacaataaaaatgccggattgaatatcaatttcattttcatggacttcatagcgccagatcctgtgcctgattttcggtatggcatagatggatatcactgaaccgaagatccaaatgatgccgaggactccggtgatccaatacggccaatggaagaaatggcttaaaacagctgctgctataacggccagaagacagaaggcggacaggatgatttcctgaagacgccagacttttaagccgcttggactgattcgattttttggctgtgctctcaacatacctacctcccattttttatcatacatacaaatacggctgatttgcaaaaaagattcactttccggcatatcaaaaaaagcggaccccgtaaaagggtccgcttcctgtgtcttagtatgattttttctggcgtctgtcacctgaagaacggcggtcgcttgagcgttttttatcgtaggaagaacggttgttggttttccctttgccgccgcggtagccgccgccttggccttctctgcgcttagaagtacgctggtttttatagcgtttgctgaccatcggcgcttcatcagtgaggcgtacaggcgtgctgtccggctcttttgtcgccattttaatggctgcagccacaactgtcactgcatcatgatcttctaacaattccgcagctgccgtcatgtagaagttcaggttgttttcgctgatcgccgtgcgcagacggtcaaccgtcatctgctgctgaccttctaatgcttcgtcaagcgtcggctctttcatgcggtccattttgcgttttgtcgtttgttcgatcgcgcgaagcatgtttttctcacgcggtgtgataaacgtcatcgccatacccgtttttcctgcgcgtcccgttcttccgatacggtgaacgtagctttcaggatcttgaggcacgtcaaagttgtaaacgtgggtaacgcctgagatatcaagtccgcgggcggcaacgtcagtcgctacaagcacttcgatcgcaccttctttaaatttacgaagcgcaaccatacgtttcgcctgcgttaagtcgccgtgaattccttcggccgcatatccgcgaaggttcagggcttcagcaagctcatcgacacggcgtttcgtacgtccgaatacgatcgcaagttccggagactgaatgtcaagaagacgagtcagggtatcgaattttttgcgttcctgcacttccaagtagaactgctgaatgttggacacagtcatttctttcgcttttacttttacgtgttccggctcagtcatgaaacgctctgcgatccgtttgatcggcgcaggcattgttgctgagaataagagcgtttggtgctcgctcggtacatttgagagaatggattcaatatcatcaatgaatcccatgttcagcatttcatcagcctcatccatgacaaccgtattcacgttgtttaaacggatcgtacggcggttgatatggtcaagaagacgccccggcgtacctacgatgatatgcgggtttttcttcaatgcgcggatctgacgtccgatatcctgtccgccataaataggcagcactttcgcacgcttatcttgtccgattttatataactcttcagatacttgaatggctaattcacgggttggcgcgattacgattgcttgaatattaggagactcggggttcattttttcaacaaggggtataccaaacgcagctgttttacctgtacctgtttgcgcttgtccaatgacgtctttatttgaaagtccgagcggaatcgtttgtgcctgaatcggcgttgcttcttcaaaccccatacgattaattgccttcatgagatcagaacttaattgaaaatcttgaaacgttatagtcaaattattcaaactccttctaattgctgtttcagtaatgtcgtgatttaccactaaaaaccgccctttcatccaaaggacaggatcatacgtatacaaagcccgaattactttacgtttaatcttaccattacactatgtgtttttcaataaggcgagatggtcaggcggccggaagcggcctgaccgaattcttcccgcgaacgaggccggcccccgcgccggacgggatttcccagccggcggtctttctttttcatacggacagaattatttcaccctgaattagtttcttcatttttgtatatttttataatgctgatcagtattttttcagttcttctctaataaatctttaacgatttcttcgagcttcatacctctcgatgctttaaacagaaggagatcgccggaagcggccatttcctgtatggcgtgaagcagttcttttttgtcaagataatggctgacgcgcccttcttcaaaatgccggcgcgctccgtcagcgatgaatgcgccgagtgtgccgtaagtaaatacatggtcgatttccgccggattgaccgcagctccgcattcttcgtggaatgctttttcttcatcaccaagttcaagcatatcaccgagcacgagcattttcttccgatagcctttcatcgtttcaattaattcgaccgccgctttcattgacgtcgggctcgcattatacgcgtcgtttacgatcgagatgccgttgtccgttttgaccagttccaatctcatccccgtcaccttcaggcggctcagtcccagagcggcattttccggcgtaatgccgaaatagatgccggcggcgtatgcggccatggcattcatcacattatgtctgccgagaacgggaataaagaaagaacggtcgatcccgtcgatattaaagtacgtgccttcttccgcctgttttatttctttcaggcggagatcattgtccgcgcctgcgccgtatgtcgttgtccggcaagtgtacgccttttggcggagcagcggctcatccccgaaataaaacagaacgccgtcttcccgaagtccgtttataatttcaagtttcgcctccgcaattccttctcttgagcctaaatcctgcatgtgggattcgccgatattggtaatgacggcagcttccggttcagcaagacggctcagaaaatcaatttcgcccctcgcgctcattcccatttctaaaacggcgatttctgtatcttcaggcatggcaagcacagtcagcggcaggccgatatgattgttgaaattgccggcggttttgtgaacgcggtactgcgtgccgagaacggcgtgaagcatgtctttcgttgtcgtttttccgttgctcccggtcaccccgataacccgtgtgccgagctcttccaaataagcttttgccaatgtttgcaacgcctccagcgtgtcatcgaccaggatgacagcacgctcttccggcggattcggttcagagcggtcccacaacaccgcggaaacgcctttttcgaatgcttgcggcacaaaggtgtggccgttaaaatgctcgccttttaaaggaatgaacagctgatttttttccaaagtccgcgtatcggttgcggcgccctcaatcattgtttgttcaaatacgggatttgtcagtgtgcctttgaccatgtctgcgattcgctttacagttcgctttatcaaaggtggcacctcgctttctgaaaatgttgtctgttacgggaaaagacactgccccttcaggcagtgtccgtcttcattaaaatgtatgtttaatcagctgtttttcggcatggcgttcttttgccagctcaaccagctgttcgatcagatcactgtaatctacgcctgcttctttccaaagcagcgggaacatgctgaatggcgtaaagcccggcattgtgttcacttcgttaatgagcacttgcccgtcattggtcaggaagaaatcggcgcggacaaggcctgatccgtcaatcgctttgaaggctttaatcgccatttcgctgatttccgcatattgttcatccgtcacttgcgcgggaatcattaaatccgtgtcgccgtcttcatatttcgccttgtaatcgtaaaagtcggttttcggcgcgatttcaccgacggcggagcatttcggttcgtcatttccgagtacgccgatttcgatttctcttccggcgattccttcttccaccacaattttccggtcatactcaaaagccagttcgaaggctttttcaagctcttcacggtttcggcatttgctgattccgacgcttgatccgaggttcgccggtttgacgaagcacggatatcccagctcctcttcaacctgctgtaagcagctgtccggcgtctgtttccagtccttttttaagaaagcggcgtacttcgcctgcggaagccccgcttgagcgaacaaatgcttcatgatgactttatccatgccggctgatgatgcaagcactccgttgccgacataaggaacgttcagcaattccagcagaccctgaatggtgccgtcttcaccgttcggtccgtgcagaagcggaaatacgacatcgatcgtcgccttttcgtcaggcgacgcttcaggaaacatttcccggttcaatgctgatagagcaaaactttcaccgttttgttccagctgaagcattttcacgttggaaaccggctcagtcagcagcgggcctctttgccattctcctttttcagtgatgtaaatcggatgtatatcaaacttctcagtattaagcgcttttgttacagctaatgctgtctgcagcgatacattgtgttcggctgactttccgccgtacaccaatcctagacttgttttcaatggatattccccccacaacaattcatctttactatcttatcactttcctcagaaaatgatctaattatttttgggcattctgaatatgaaagcatttgtatgtaattcctttttattttatattaaaatggcatggaaaaggagatgtgtcatatgaaaaaaatcagtacaacagaacaatttaatgaacttattcaatccgacaaggaaatcatcgtgaaatttttcgctgactggtgccctgactgcacgcgcatgaatatgttcatcggcgatattttggaagaatataatcaaaatgattggtatgaactgaacagagacgagctccctgagcttgccgacaaatatcaggtaatgggcatcccgagccttctgatctttaaaaacggcgaaaagaaagcgcatcttcacagcgcaaacgcgaaaacgcccgaagaagtcacagagtttttatcacagcatatttaattcgtttcacgatctttgtttatgacttcaggctctacatgaacatggacatgagtcacatcatgttcatgttttattgcatattcgacttcatcggctacttcatggccttctttcacagacagtcccggatctaccgtaatgaccatttccacatgaaccgttctccccaaataccttgctttcacatccttcagcctgctgacctcttttatttctttcaccgtgtgtttatacggctccaaatctttcagatcaaacccgtccgtcaatgagtgggaagcatctttgaagatgtcccatgccgtcttacagatgatgattccgatcagaaaagcaatgaccggatcaatccacggcagatgaagccgggccgttaagacgcctataaacgccccaatactgacataggcgtcagaacggctgtctttcgccgccgcatgaagcgcagaacttttaacccgatccgcaagacggctgttatatacatacatgccgtacattacaatcgcgcttccgagcgccgtccatgccgcaatgaggctcggctcggcctccgttccgctgacaatcgcctttgctcctccgatcagcacttcaataccgaccgccatcataataaaagacgcaattaatgaagaaattgtttcagcccgataatgtccgtaggcatgatcagtgtcagcggggcgctgggaaatccggagcccgatcagcacagccagtgatgcggcaatatccgtggcattatttaacccgtccgctctgagcgcttcagaatgataaataagaccgatcaccagtttgacggcggcaaggatgaggtacgcggcgatattaagaatcgcgcctttctcaccccgttttaagtttgccgtttgatcattcatgtaaggactcctccattctcattcatagtatggatggaaaagcggaaaaatagcagctttgatctgacagaatcaaatcaattcgacagcattattccccgggaaactttttgtcgaaaaattggcggtatttttcctttacatatgaatatgcccattgtatactttcattaattgataatgattctcaatatcatttgattaggagggtaatcatgaggtcttctcctcagctcagatcatcagttgaaggacgaaaaaaacatctgatccatttgctgatcaataacggaatatacaaaaagtcggaacggcatttatatgaattatcgctcggagaattagaaagcgaatacaaatatgtaaggaaggtgcggacttatggcgaaacgtaaaataaaaacatacgaacagctgataaaagaaaacaaggcggccattatgaataatcaaaagctgatgaatgtgatctatgacagaattgaccgcaagcatcaaaaactgctccggcacaacagccatacataaaaagagcctttttcaggctcttttttttattgctcaaaggcttccgccgctaatttgccgatgaccgcatcgtccatcggcggattgtgaaggccggcccgggcatcccgataataccgctgaagcggattgtttcgctcaaggctttttgcgccagtgattctcattgctttatcaacaacagaaaggacggcatttgtcacaatatgttttgcggcgccgagctcgcttttgatgaaagggcggcgtttcgggtcatcatacatttgcgccgccgtgaagagaaactgtctcgcttttaacaattcgagctccatttccccgacacgctgctgaacagccggcacgtctttaatcggtccgttcaggctgctcggcgaatattcggatgcaaaccggacggcatagtcccttgccgcttgagcgatacccagataagcagcgggaatgtgaagcagccagccattcactttcgccgctcttggcccgctgataagctccacaagccgctcgtcattgaccgtgacatgatctaaaaggagatcatggcttccggtcgccttcatggcaatcatatcccatgtttcttcgactgaaacgcctgcctgatctttatgaatgagaaaaacaccggtcgtttgtttttcttcaatccatgccgtcacaagcatataatccaaagtcagcgaaagggttgtaaaggtttttcggccgttcagcacccattttccgtcttttttgacagcggaggtgccgggtcttcctcccctcgtcggactgccggtctgccgttccgtcgctgccctgttcaggacagctccctttttcacctcttctgtgataaatgaaaagacatcttcatcccagctgtttccttctccgagctcacccatgacggataaatgccagccgattccgagagccacggccgcgtctccccgcgccagccgttcctgaaacagcaccatatcataaacggaaatgcctgcaccgccgaatgcctcaggtactgttaacgccgtatatcctgcgtcgcgcagtctttgaattttctccgcgggaaaacggcccgcctcatcatcaagcgcggctgttgtttgaaattcgtctgcaagcaggccgattttttccatccattccctctgccgttcattctgtatccataaagacactggaatccccccattataattccgataaagttaataagtattatagagattcaagtctcgtttcgcaactgtgaggctgtacaaaaaaacgcgctattccatggaatagcgcgttcagactgcttccgggccgcggtcctgcttgagcccgagataaatcagcatatatgtgagataccccatcgtcatcacaagcccgccaaagaaaaagcttgaaaaaatcggctcttcaaacgcggtaaccgccgcaagcacgatccagcttgcatacaggtagatgatgaaataacggaatcccgtcttcaatttatataagagaaacagccccactgtagaaaacaatcccagcgcaagtctgaaataaacaagatgttcgaattggaacatgaatgacacaaaggaaaaaccaagcaataacacaatcggtaatgcggtaataaaatttctcaagtgagcacctccgtcattacctttattataaatcaaaatagcataaattattgatttatcgtgatctttttcacaaaaatgtcattcctttactttatacccgaacatcgcgtttgcaaaagctccaccaagcgacggctaagaagaatacgatatggataatgataatgcctgcggaaaataacggcgtcattcccgcaaacagcggtttcgccccgctcatatattgcgtcaggtcagtatttgcgaacagcagaaaacttccccatttgttttggaagagcgacataatcgtcacgagtgattttgcgccgtacagcacgataaatgacaaaatgacggccgttgcgctgtttcggaatacagaagaacacaacaagccaaaacatgccatcgcaaacgcctcgacccagttcgtgccgattactttcagggtgttcataagaagcgtccctgattcagatgtcaccgacacgccgaagaaagccatgccgaacagcagagacagaacatagtacgccgcatacaggtacaagctgaccaaaaatacggtaatgagtttagatacaaaaatccgctcccgctttaccgggcggattaacaaaaatttgatcgttttcttatcaaattcagcggaaatgatcgttgccgcgatcacgattgttaacgcctcaagcagaatattcagcccgggcgcgtacgccatatagccgatgaaattctcatccgttccggaactgatgacaagccgtttaatgacaagcgccataataaattggagaacggccatcagaatcagcgccactaatgagacttttcggttaaagagcttcatatgctcattcgctgtcaatttaaacattcgtctccccctcctcttgaagcgccgtcgtcactttcatgaattcatcctccagcgattccgcatacggcatgatggaatacacgagaaagtcttgtccgacgagcgcacggtttaatgccgggatgtccttcttcgctacggtgacggtaatgcccccgccgtttttctccggagcaaattgctgttgggacagccattcgaaggcttcgtcagccggctgaatgtcgaggacggctttttcttctttttcctcagcgccgcgcagaacaacctctgttttgatctcacctttttgaatgatgatgacacggtcgcaaaggtcctccacttcacgcaataaatgcgtcgcaaaaaggatgctcgtcccttcaagctccgcgagttcctttaagtgatcgcggaaatccttcattccgccgggatcaagcccgtttgtcggttcatctaaaatgagcagattcggacggtgaagaatggcctgcgcaatcccgagacgctgacgcataccaagggaatacgttttaattttgtcatgaacggcgtttgtgagcccgacccgctcgatgacttcctgaagcctgtcctctttgatgtttttgtgcatgttggcaaagtgcttcagattttcccaccccgtcaggtacgggtagaattcaggattttccacgatcgctccgactgattcaagcgctttttcgaaatcagcatcgtgctgaaagccgttaattgtaatcgtgccgctgtttttctttaaaataccgacgatgattcggataagtgtggtttttcccgacccgttcggaccgagcaaaccgatgatctcgccctgcctgacatccatgctgatgttttttaaaatgtgctttttgcctattgttttgtcaaggccttcaatatgtaaaatcggctcagtcatacagccttcctcctttttcacaaaaaataaacagtgcccgtacataggcactgtctgcattataacattagtcatatattcgtgaagagccggagccgacgttatgtcttatccgggaccggtccgtttttttccttttcttcattattgacgacatccagaatatcaagcaggaacacaaaaatcggaattccgataatcaagccccagataccgaagaaatgttccgagaaaatcagaaccgtaaaggtaaaaaagatcggcagttccgttttcgctgacatcagtttcggattaaggaagtacgtctcaatcgcatggatgacgaaaatgaccagcacgatgtagatgacatacgctgcgccgcccgtcgtatacgcaatgatgctgagcggaatgagcgaaatcaccacacccgccacgggaatgagcccgaggaaaaagaccatgattgaaaggccgaacagctgcggaaaatgcagaatcgccaatgcgatcaaggtgaggatacagttcaccagcgcgataataaattgggcttcaagcactttgccgaatgttctcgcaaatttgctgccgaaataagcaagttcgtagtaaaaaacagacagcttgctgtgctgaaattttttcataaactccgtgagccgctttttctcgaacaggaaaaacatgctgagaatcagtgacatcacgacctgcaaaccgaaagtgctgatatcggccaagtatgtatacagtacattaaaaccttcttttacataggaaccgatattgatatcgccgaacacgctcgatatctcatcataaaacggaatgacatcgggatgatacgcgatgtgcttgatctgcttaatcagctgttcaatctgcttggcaacaatcgggtaaaagacaaagcctccgacagtcgccccgacagccagcgcaatatataaaacggtgatgaccaccctctggctgatccggaaaaaatggttcaacacgtgccggatgacagtctccagccgatccatcagaaaagtaaaaataaacgtaagcaaaatcaaattaatcatacttcggaatacaactaacaccccagtcaaaacaagaaaaacggaaaaacgtctgacacccggatgctgaaaaaatttaaaaatagccgccatttatacactcctgctaggacaaaaagcccttagatttcatctttcactctctaattgtaaattatataacaaaatgacgctaaggtctttgtccacctcctaataaatttaaacaaatttatcttttttactcatggaggccgaaaaaaagaacggcatgcccgatgcatgccgttcctttccttttataccgccgttttcatttcttttacggcctgtgtgcttttcgtttcgtcaaactcattttcgctcttggctacgatgatggtggcgattccgtttccgatcaggttgacgatcgcccttccttcactcataaagcggtcaacgccgaggagcagcgccagtccctccagcgggataacctgaagcgccgataaagtggaggcaagtacgataaatccgcttccggttacgcccgccgcgccttttgatgtcagcatcagcacgagaatgatcgtaacctgctggccgatggtaaggtcaacaccgaacacctgcgccagaaaaaccgtcgccatggacagataaatcgaggtgccgtccaggttaaaagaatatcccgtcggaatgacaaggccgacaaccgatttggaacagccgtaacgctccattttatccatcatccgcggaaggacggactcagaagagcttgtgccgagaacgatgagcagttcatctttaataaaacggagatagttccacaagctgaaaccgaatagtttgcaaatgatattcaaagcgacaaatacaaacaggaacatcgtaacgtatacagacagcatcagactcgccagcggcttgatggaatcaaggccgaagtgcccgatcgtataggccatggccccgaatgcgccgatcggcgccgcgcgcatgatgtagccgatgattttgaaaaaaacgtgcgacagtttatcaaagaaatcaataatgcttttgcctctttcaccgagcgccgccaggccgacaccgaataaaacagaaaagaataagacctgaagaatgtcgccttttgcgaaagcgtcaaccatatttgacggaacgatgtgagtgataaactcaatccagtcaatcccctgtcccccgttttgcgtgtactgagagacatcccctttttcaagcttgctgtaatcaagcccctcaccgggtttcatgatattgacgaccagaagtccgataataagggcgatggtggtcacgacttcaaaataaataaatgcttttcccccgactttgccgacttttttcatgtctcccatcttggcgatgccaagcacgatcgtcaggaatatgatcggtgcgataatcatttttaccgcattgataaatgtatcgccgagcggcttcatctgcttcccggcctcaggccacacaagtccgacaatgacgccgatgatcaccgccgtgatgacctgcaccgtaagatttttgaaaattttcatccctactcccccttgcctctcgctgcgtctatacgagaatgatagcgttttcatacgaagaggggaagcttatgatcataacggacattttggtctttttggtctcggctagcggacgaatttgtagcggttaaccggccggcccactcccccgtattgaatgtcgagcttaatctggccgtctttctcaagaaaatcaagataacgccgcgccgtcacccttgcgatcccgagcgctttggcggcttcttcagctgaaagcggctccgtctgctgtttcatataggtcaaaatttcattcatcgtaaaatgatttaaccccttcggcagatccctggacggattttgcggaattttaagcagcatgtcaagctgctcttgcgacatggtgtcatgctcttcaattttccgtttatattgtttatagttttcgagcgcctgtctcatccgctccagcttaaacggcttcaaaatatagtcggccgcaccgttttgcagcataagctggattgtttctttgtcttttgcggccgagacgatgatgacgtccacttcgagcttttgttttctgatttcctggagcgttttaattccgtcttttttcggcatgtatacgtctaataccacgagcccgggccgcagatcttttataagcctgattccctcgtctccgtcagcggccgtggcgattacgctgaaccccgaaacaccggtgataaattctttattcacctcctgcaccatcggatcatcttcaataagcagtaccttgatgtccatcgaatgattcctctcccttcatcggaaataaaatagaaaatgccgttccctgtccctgccgtgtgtcgacttcaatgacgcccatccctttgtcgacgatttgtttgacgaggtacaagccgtatcccgttcctcccgttttattgacggtaaaccctttgtcataaaggcgcggaatgtgctgatcggaaatcccgcttccgttgtcttctattaatatagcaagcacctcatcattttgctcgatactgatgtcaatatgtttgtcctccgtgtccgctgtttcgaatgcgccgaacgcattctcgattaaattgccgagcaggacgacaatgtcatgctggtcgacatgctccggaaatgccgagaaactgctgttttcatcaattttcacagagatgccaagctcttttcctcttttgattttgcttaacagcagccccgccgcagcgtcattctgaatggcctgatgaagaaaatcggtgacgctttcttgttctgacgattccttaaaagcaagctggagcgctttttctgattttccgagctgaatcagtcccgcgatggtgtgaagcttgttcatatgttcatgattttgaactctgagcgcatcgacaaaatttttcacaccggtcagttcttccgccattttcgccgcttccgtcctgtcctgaaaaatggcgacggctccgatgaccttctttttcatgacgatcggaattctgctgctcatgatcacctttccgctgacttggatttcttcattgtatacggctcggttccgctcgacgatctcagggagccgcgaatcttttaacacgtcccagatcagcctgccatcggtctcttgtctgacattgaatatctgcttcgctttttcattaaaaatggtgatgtgatgctggttatcgatcgcgatgacgccctcattcattgaatgaaacgtagcggtccgttcctcatacattctcacgatctcatggggctccagccaaaacatttgttttttgatgtggcgggccagtaaaaaggagccggccagtccgaacccgagcgccagcagaacgataaacagtatttcatgtttcagctgaagaagaatttcaccgaatccgggcagcgctttaccggccagaacgacgccgatctgattcaaatcccggtctttgatgggataaaaagcgcggacggcggtgccgatctctccctttgcttcggaaaaataaatgtgctcggcgaacgccgcggcttcgtcctcaccccttgaacgctttccgatcattgtgctgacgggatgcgaatagcggatatgatccatatccatgacgacgatgtagtccgcttcattgatgatccttatttcttcgaccgcatggcgcacgtcatccctttgttttttctgctcgagggcgcgtttgacatcggtcatctcagataccgtccgcgcggtattcatcagccgtttttttagctcgcgctcctctgtatgctgaatattgccgatcagcacgatgccgacgatcaaaaaggtaaaaagcacgacgatataagaaagtatggtgattttccagcggatggtgagcttttttttcgtcattggcctcttcctttccgtctctttacgaaaacggcccgcccgattatgcttgttatagaaaatggcggagggggttttcgatgaaaagcttgctgacttgtctcagcctgatggtactcggtatcggaaccgctttattcatcggctttcatgatcatttctcaacggatgaaccgtattatgatgacgaacaggaaggcctgaaagatcaaatcgttttcaaatttagccatgtcgttgctgaaaacacgcctaaagggcgggcggcgaataagtttgccgaccttgtctatcaaaagtccggcggcaccattaaagtagaggtgtttccaaacgggagcctctattcagataatgaagaaataaacgccctccaaaacggggacgtgcaattcatcgctccctccacctcaaagctcggatcactgtctcccgaatggggtgttttggatctgccgtacgcgtttacaaactataaagccgtgcaagaaggcctcaacggcaaaatcggcacacgcctgttcgcttcattagaaaagcatcatttgaaaggactggcgtactggacgaacggatttaagcagcttacgtcaaataaaggaccgatcttcactccggacgatttgaaaggacaggcgctcaggatcatgccgagcagcgtgatcgaagaccaataccgtctgctcggcgcgcacccgcggcaggattcctttaattccacgtttcagctcttggaaagcaatcttgtagacggagaagaaaatacgatttcaaatatctattctaaaaaattttataatgttcaagattatttgacaatcagcaatcacgggtacctcggttatgccgtgatgaccgacgagcatttctggaattcgcagacagaaaaaacgagagccatcttaacggaggcgatgagagaaacgacggaatggaacgaagcctccgctgagaaaatgaataaagaccagcttgaagagataaagaagaattcatccattcatattcatgtgctgagcaaagcggaaaagaacacatggatgcaacgcctcgacccgatttacggacaatatgaacaggtgatcggccgcgggcttgtgcaggatttgttatccttgcgccgcgagccttagcaggaccaatacgcccatctccgtttcatcccttttcccgccggggaagtaaatagggacagagcaaaaaaggagatggagacatgtttacacatacgaaaaaactgcagcatccggctaaaccggatcgtcctgacccgctgttcgcaaaaaagatgcaggaaattttagggggacaatacggggagatatccgtcgccatgcaatatttgttccaaggatggaatacacggggcaatgaaaaatataaggatcttctgatggataccgcgacggaagaaatcggccatgtcgaaatgatcgcgacgatgattgcgagactgttagaagacgccccgctggcagagcaggaaaaagcggctgatgatccggtcatcgggtccattttaggcgggatgaatccgcatcatgcaattgtctcaggactcggcgcaatgccggagagcagcacgggcgttccgtggagcgcaggctatatcgtcgcaagcggaaaccttctggcagacttccgggccaatctgaacgccgaatcacaaggaaggcttcaagtcgcacgcctgtatgaaatgaccgatgataaaggcgtgaaagatatgctcagctttttattggcccgcgataccatgcatcaaaaccaatggcttgcggccattaaagaattagaagaacaggaaggtccgatcgttccttccacattcccgaaggcgctggaaaaacagtcattctcccataagcttattcatttctcagatggagcagaaagcgctgaacaaaattggctgaaggaaacagcgccggacggagaaccatttgaatacgaaaaggaaccgaaagcgcacggcgaaatagctaagctggatcccgtcccgccgtatgtccacaacacgcttcccggacgcgagtaaagacaaagcccaaaacaaactgttttgggctttcattatgccttctgaaccgtccagtccggttcgtatcggatgtccgggtgatgtaacagctcgtgaatgatagcttcatcctcttcgtacagcatcacttctattgaaagaatcgcagccttctgctcgatttcttcgtatatgcggtcatgttcgttccccataaaatcatcataggcctgtctgttctcccaaacgctgatgatctctgcgatgaacaggccgtctgcgtttttccgccacccgccggcctgtttgacgaagccatttacacatgataatgctccccaccttgactgtgcttgcgcaaatgcttcagcgtttgcagcgtctgtttcacatacaatcttcttgatcagcatgaccgttcctctgtgatgactgttttcgcatgcgtatgctcgacacagagattcacggttctgacgtatgagcgggtgcggtgaatcgtgcctttcgggatgagcaggctgtcatttgctttgagcactgcggtttctttgtccttaaaatcgatcagcagctcaccttccagaacgatgaaccattcatctgagtcagggtgatggtgccagtcatattctcccgtaaacactgcgaggcgcacacagtggtcattgatctccgcgattgaaaaattgtcgtgtttttctttgactttattggcgatagcgagcaaattcagcatgtcagacacgagtgaaaaacccctttttcattttattgtatcgcaacggcggctcagatcaagattttcccaaaataaaaagcgatccagctgatgcgccggatcgcttttgatctgcaggttgtctgccttttatgcttttattagctgcttcgtctgtttccgcctttttggccgatttccttataaaaatctttgtcatgatttttgcttgttgcttctccgcctttttggccgatttcttgatagaaatccttgtca

SEQ ID NO: 50 - DNA, 1042 bp, Bacillus amyloliquefaciens
gatggaattgtttgttaatgaagcgctatatcaatcaaataacatatcttttaatattttatatttattccgactaagtgataaaatttcatctgtatctttaagtttaagattatatgatttcatataattatcaggttttatttcttctatttttttaaagggtactatataggactgatgtattctgaaaaaaccataactctgaagtttaatttctaaatcattcaaactttccttactatcaataatttcctcatttactaaatgaattttcgtattgtctttttttttctcaatataatttatatcttctatatcaatgaactttgataatcccttattttttatcactatttttttacttttataaaaattaaaggcatgactcataattctttttacagtttgatttaaacgaaatacattaattggtttaaccaaataatcttccggataatacttataagctctaattccaaactcaatgtaggaacttatgaatattattttcacattcggataattaatcgttagaaactctgcaacttcaaaaccataagtatttgaaatactcaggtctaagatggcaatatcaaatttatttgtgttaatttccttcagcagctcttctgctcttgtagtagcaaaaaccaactctaattcagatatactgtttactaaattgactaatctatacaaatcggatatatcgctttctaaaatcattacttttaatttattcatattaaaatcacactttcaaacatacttttacaaagaaacaacacaaggatcttttgtactaggttctttcaatatttagaaagtcagtacccaaaaaggtgaagatgttactttataactaggtttcccttaccttttcatgacacaataattaataaaaacaacaaattaaataggtttaggtacctaaaacctctgattggcaaaaaattcccgttaatttgttataatatattcaaaaaggagattgtgatggcaaacagaacaaataatatatctgaaattgaacaagaaa

SEQ ID NO: 51 - DNA, 17905 bp, Bacillus amyloliquefaciens
ctgttttcattatacaagctgagcttgtttttttcgtgcctgtttcgcggcgtcgaccatattttttaatgccgcaacggtttcttcctgctgtcttgttttcagtccgcagtccgggtttacccagaagcggtcagtcggacacacttcaagcgcgtcatcaataatttgatagatttcttcagttgccggcacacgcgggctgtgaatgtcgtatacaccgagtccgaggcctttcacgtaaggatgttctttcaagtattctaaaaatcctccgtggcttcggctgtgttcgattgtaatgacatccgcgtcaagatcattgatcgtatctacgatatcttcaaagttgctgtaacacatatgcgtatgaatctgcgtctcattttgcacagaagacgtcgttaaccggaatgcttctgcggcccaagttaaatattcatcccaatcctgcgtttttaacggcagtccttcgcggagcgcgggttcatccacttggataatctgaataccggcatcttcaagcgcttttacttcttttctgagggcaagcccgatctggaaggcgatttcttttcttgaaatatccacacgcgggaatgaccagtttaagatggtgacaggtcccgtcagcatgcctttcatgtgtttttccgtcagcgattgggcgtagaccgtatcttttaccgtcatcggttcgataaattcgacatctccgaaaatgacaggcggacgtacgcagcgtgaaccgtaagactgcacccatgcatatttcgtaaaggcgaatccggccagtttttcaccgaagtattcgaccatgtccgtccgctcaaattctccgtgaacgagcacgtctaagccgatttcttcctgaatgtcaacccagcgcttcgtttccgcattaataaaggcttggtactgttcatcagtccaatcttttttgcgccatttttgccgtgcgctccgcacctcggcagattgagggaagcttccgattgtcgtcgtcggcagaagggggagaccgagtgattcattctgcagcgccaatcgttcttcaaagattgccggacgggagaaatctttttccgtcagctgattcagctcttctttttgagctgagttcgctcctgttgcgaatgcttttaaagccttaagtgccgcttttgattcttcgatctgctcactgacggccgcttttccggacagaagcccttcttttaagacgccgagttccgccagtttttctttagcgtatgacaggccgttcagcaaatccttttcaagatgctcgtcagggtgtttcgccaccggcacgtgcagaaggctgcttgaaggctgaatccataactcctcaacatcagcgtggctgaggatatccgaagccgcgtcaaggcgttcttcaacatcgattttccaaatgttccggccgtcgaccacaccggctgccagtactttatctttcgggaagccgtgctttttcagctgctcaaggtttctgcctttatcatgtacgaagtcaagcccgattccctgtacaggataagaaacgagttcttcatatgcatcaaccgaatcgaagtatgtctgcaggaggacattcagtcctgaaagctcttttgtgatcgcctcatagaggtctttggcggcgcggacatcttcagaagaagctgtcacaagggcaggctcatcaatctgaacccatttgacgccttctgcttcaagctctttcagcagctgcacataaagaggaacaaggcgcttttgaatcgctttcgcttctgattcttcgtatcctttcgcaagtgtgacgaatgtgtacggaccgacgatgacaggttttgtttccgctccgaattcttctttgatccggcggtagtcgtcaagctgtttgtttctcgtcagacggaattcaatgctttcgtcatattcaggaacgatgtaatggtagttggtattgaaccatttcgtcatttcactggaaacggcgtcttttacaccgcgggcaatcgcaaagtatgtatcaacgggatccgtgatgctgcggaatctttccggaatccagttaaagctgacggctgtatcaagcacatggtcataatgggtgaaatcagagaccggcacgatatcgatatgttggtcaagctgtgttttgacagctgataagaataaaccgtcaagctctttaagaaacgtttctttatcagtgttacctttccaataagcctcaagcgcttttttccattctctgttcaagccgattctcggaaaaccgaggttcgaagttttgattgttgtcattaagtttcctcctttaagtgagatgtaacaaaaaagcctctttctcatgagagaaagaggctttaacttcaaaatgcaagcctctcttatctctcagatcacgtctgatggaattagcaccgtgccttatgagacagtcgtctcggcgcaaaaatcacgcgccccatttcacaatggaattacggtcggttgctgttggggtcaaaaggccaatccctcgcccaactctcgataagagaaaatatttcaatttttttgaaaagttacatcatttgttggttatcttatcagcttattcagatcactgtcaatagaaaatctcacaatttaaaaattggtgatatgacaagctgattaatcattatacgagaaaaatatcagaaagacagcagctgggcctgttcggctctttccatcagcacttcaggcgcgtctaaatacagaaatccgttcccggccaatgttttggagatgtccaaaggaagggtccgccgcacgagctgggcgtagacttcagcctcagaaagcgtccgctgaaacgcgtcctgttcaagcccttttattaaggcaagtgctccgctcacatgcggggcggccattgaagtgcccgtcagcttcccgtatttatggttgggaagggtggagagaatattttctcccggagccaccaggtcaatctctttatttgcgtttgaaaattcagacgatttacgggcgattgagactgatccgactgcgatcacttcgttgtaagcggccggatacgacagttcctctgtacgctcgtctccgtcgccttcgtttcctgctgcgcaaacgaccagaacaccgctttttaccgcatttgtgacggcttctttcaattcaggcacatcgcttggcccgccgagtgacatggaaatgatatcggccttttgttcaacggcgtagttgatgccgttaatgatccattcgtatttgccgctgccgttttgaccgccgagaactttaacgattaaaaggcttgcttccggcgcgacacccgaaattccgccgtttgaatcattggcggcaatcgttccggaaacgtgtgtcccgtgtccgttataatcggaaatcgcgtcttctttgcctccgtcatcatcggtgaagtttttcccgccgacaatccggtctttcaaatcaggatgattgatgtcgcagcctgtgtcaagcaccgcgattttaatatccttgcctttaaacccttttgcccacaactctggcgccttaatcactttaatcccctcaggaagctcgttcacatccatgatctgttcatccgtgacataaggaatcaaatgcatttcaccattcataaaaaagccctccttttttatgcttgcgagtggatacaagggtgttgctactattttatggcagagcatgccggccggaaagagtcatttgaagcattttcataaaaaaggcgtaatctatcgtactaaaaaatttcaaatatatggatagtttgacagctttcattttcattcatgacccgctgacgctataattggaaatgggaaaggagaagagatatgaagataagtgaagcattatacaactatttttcagaacaagtggatcaaattgcgaaagagtggatcgaaacgatggaagattcggatccgaattcgatttattctttgacaaatcctgtcatcacagaagaactgacggagcaggataaagaattttaccggcatattaataaaatgtatattatgccgcaaaaagaatttttagaagagttcgagcagtgggtgattgagctcgcgaaagaccagaagcatctggatacacccgtccagtatgtggtccgtgaatttatgagaaaccggagactatacatcagttattatgatgcgtttgccgataaacatgaatcttcgtttgcacagggagaaaggaagaaatgggagaatttaattgtacaagtatttgattttacgatttacacgtttgtcgatcatgccgagcataactcaaaaatgcagctgaacgcgcaaagagaaatgattttggagttaagctcgccggttatcacgctgagcaaacggacggcgctgctgccgcttgtcggcgatattgacacggagcgcgccaaattcattcttgaaaatacgctgagcacatgtgccaaacggctgattgaacatctgtttattgacctgtcgggtgtagtggttgtcgatacgatggtggcgcatcagatttttaaattaattgaggcgctgaacctgatcggcgtcacgtccactttatccggaatcaggccggaaatggctcaaaccgccgtacagctcggcattaatttctcagatattacgatcaagtccaatctcgctcaggctctcaattatcatcaataacatacataacaaaacaggctgccgaatcactccggcggcctgtttttatataaacaacaatgaaatgagccagcttgcgccgaataacagaagcacgagcaggaaaaagcaccagtcggcgcggcgcacagtaacagttctgtaaaacgtgcggtttcggctccccgtaaagcctttagattccatcgcgatcgccgtgcgttccgcctttctgattgcgcctgccaatagcggaatggtgaagcgcctgacggcggagagctttcctttcagcccggaatcagacgccgcgcccctgattctgtgcgcctgccggatgatcaggatttcatctttcagaagagggagaaaccggaaccccgcgataacgccgtatgcaagcttgggcggcagcttacactgctgaatcagactgagcatgaacagaatcggatcggttgtgaaaagaaacatcatcgacaaagcggaaaaacataaaatacgaaacgcgatagaaatcccgagcgccgcgttatcactgttgacggcaatcggcccgagcttaaacagcaggttgcttccggttgtcgggatgtttccgaatacggcggctgtccataaagaaccgaaggccagaatgacaaacggaatcgtgaacagcagccattttttcagcggcacacgccccgccgagaggacgcctcccgcaatgatgatataaaataaagcaggggtgtacggattataaataaacgacagcataatgacgcataacaatacagccgccgcctttattgacgggttaacagcctccagccgcaagttcatttctccgcctcctgtcgtgtttcatccattcataccgcagcggcaaagccaaatgcgcctgctcggcgatcccggtgttatcagaaaacaaagcgtcgggagttccccggaataccagtttcgtgccgcagagcacaaggatcgtgtcggcataatctgagacgagttccatatcgtgtgtcaccattaaaacagccgttccttccttttgaatctcacggagcatttgcatacactcccgcgccgttttggcatcctgtccgaaagtcggttcatcaagcatcaaaacgttcacattgtgcataagcatcgtcgcgacgctgagcctgcgtttttgtccttggcttaaagaaaacggatgctgtgaggcatggcgtctcaggccgaatcgggttaacagctgaagagctttctcctttgcggctctgctgctttcaaaaccgaacatcagctcttgaatgacggaatctgtgacaaactggtgttcaggattttggaaaacatatccgatcagccgccgcagctctttttcagaataggaatcaatcggtctgccgtctattttgatgtctccgctcagcggacggatgagcttggccgcggcagaaaggagcgtggattttcctgttccgttagggccggcaatcgcggtgattgaacctttttttacggaaaagctcacatcctgaaaaatgacgtctgctcctcttgagaatgacagctcgtgaacgctcagcgcgtcttctgccgaaagcgcggcgggccggtgttcgggcagagatggtgcaggttcgtgaaacagcttttctttacacaatgtaaaaggaatgctgacgtgcttctgcaatgagatcacacgcgggatcggaatgccgagctccttcagctcttcaatctttgtttcaaagataatgtccgtctctccgtccatcaccttctgacccgtttcgtcaaggacaatcgtcctgtccatccacggcgcccaatgatcaagctgatgttcgataacgagaaggccgaagcctttttttgcttgaagatctttgatcagccgcactaattcacgtgcggaatatggatcaagctgtgccgtcggttcgtccaaaataatgagttccggttccatcgcaatgatacaggcaagcgccactttttgttttgaaccgcctgacagcgaagcgatcgttcgcgttttcagatgagtgatctctaatttttctaaaacgtcatcgatgattgcgtccatatcttcttttgtatattgcaaattttccaggccgaaggcgatttcgtcttcaaccgtcagcatgcaaaactgctggtccggatcttgaaacacgacgccgatggatctggcggcgggttctgtcagatgtgaaagaggtgttccgtataaagaaacggttcccgattgaaccccatcgcatgcttccgggtacagaccgtttaaacaaagagcgagcgagcttttgccgcatccgctcggcccgagcaataaagcccgctctcctttgcggagctgaaaggacacgtttagaagaatcggcttttcatcctgatcataagaaaaggtaagacggccggccgatagaaggggctcagatgcctgcatcttggttcacctgtttctttttcttcttgaattgttttccgagcgccatgccgttcagcacccctgtgtaagccagcgcatcactgatcgctttgccgagaaggccggcaagaagcgcacctgagaccagacggatgagaagcatgacggctaataaacccggattcaaaacagagtatccggaaacgaacaagtcataaatgaagctcgtcacagaagaccccataccggataaaagaagcacgggcagggtataaatccgccagcgtgtcgctaaaaagaccgcttccgcaccgattccctgtgcgatcccgatcagaatcaccatcggtcctgacggatttccgagtaagcactccacaaacgcggcgatgatttcagaaacgagagcagctcccggtttttgaataatgtacgcggcaatcaccgagacgataaaccagataccgtaaatcggttcgtagctcatccggccgaaaaatcctgccgctatattgcttgcatgagttgatactaaataaatgacagcaaatacaacactgatgacggacatgacgacaatttctctcattttccaatttttcattgtgatctcctgctttcttatcggatagtcgtatgtatgaaagagatgattttacaggcagtttatattcagtttcatattgcggtgtcctcccccgttttttaatgaaaaataaaaaactgcatatccgagggaatatgcagcagcagaacgaaaacgcatggggaaaaaccctgcgctccggtcaatctgcacttccccacgctggtattatccagatcgggttataagggatcaaaacacgcctgccgcatgttttatctcagccgataacagcacccctagtgcgtttcctatacagttttttatgatgacatcatcatagttgatcatgtctgttttgtaaacagcctttctccaaacagtgtttggaatcggaccggaagatcattcataaagataagtagagcccttttgatcaaaaggaaacggaggacatctatgtttgttcatacagtgcagtctggcgactcgttattttccatcagcagaaagtacggataccctgttgacagcatcagaagcgtcaacgggcttgaggaaacgaatatcgttccggggcaggcgcttttaatccctcttaatgaatatacggttcagccgaatgatacgtatgccgttatcgcaggtaaggcttatgtgccgcagatgcagctgatgcaggcaaacccggatattccgccgaaccggctgcgggcgggtatgaaagtgaagatccctgatatctctaactatcttgcggggaccctgcaattttatgtcattcggacgcctgaagcggatagagagttaattaatgattttgcgccgtattcttcggcgatttctttgtttgaatatcattttggcccgaatggagatatcattaacgatttaaacgacagaaccgcaatagaaaccacatggcaaaacagagtgcgcccgcttgccgtcattacgaatctgacagaagggggattcagtccggaattagcccatcaagtgatgcaaaatccgacggcaagaacgaatctcgtcaacaatatcgtctccttaaccgtaagaaagggatacggcggtgtaaatatcgattttgaacgggtcagagaagctgacagggacctcttcacaggatttctccggcagttaaaaacccggctttcagagcatcacctcgcgttaacgatatcggttccggcgaaaacaagtgatgcagtgccgtggctgaggggatatgattacggcggaatcggagctgtcgtcgattatatgttcattatggcgtacgactggcaccacgccggcagtgagccgggacccgtggcgcctttgacagaggtcaggcaaacgatcaattttgctatcaacagggtgccgagaagaaaagtgattctcggtgttccgctgtacgggtatgattgggtgattccgtaccgtccgggaacgatcggatccgccatctccaatcagcgcgccatggaaacggccatgaagcatcaatcagtgatccgttattcccagcaggagcgttccccttacttccggtatactgatgaaaatggaagaacgcatgaagtgtggtttgaggatgtgcgaagcatgagtgaaaaaatggttctcgttcgggagttcggactgcaggcgatcggcgcgtggcaattaacgctcggtttcaaaccgggcccgtggctgcttaggaactttttcacgatccgaaaaatatagctgcatgtcccgctctgcaagtgatttttttcctatgataacgggtcttcttttggacaatctaaaattgaacaggaggtctgtcatatgaagaaaagggaagagcagtatatcaacgaggctgagtatgtaccgcatccgacaaaagaaggggagtacgcgctcatgctgcatgaatcctatcatttcctttcagaagaggatgaaagcgatttgccggaataagggctttatgcctttattccgtttattttataggcatgtgctgaaatcacaaatttaaggttgacacattccttttttttctgtaatctcagtgtgtcaattcaaataagaacttcgttaggtgaggctcctgtatggagatacgctgctgcccaaaaatgtccaaagacgccaatgggtcaacaggaatcatcgacataaggtgattcttaacgcagctggatggctgtcctatgccatacagtgctaaagctctacgattggaggccccgcacgtttatttgccgtgcttgttttcgccttcatatcagaaggttttttttatgcctcaaaacgtacacgactgagcatgataaggaggtgcggagtatggattctccccattcgagtatgtcagaagaagtacccatatacagccagataaccagtgacgacatgatgaggagacaaaccgccgcacttcccttgacggacggcgcgtctccgtaaaggaggtacgagtcccgatggtccaaaacatgacctatgacgaactcatattacgcattatcattttattgcgggacggaaaaataaaagaattccgaaacatgatagatgagcttcagccctatgatatggcatttttgtttaaagaaatgccggaaaagcaccgggcccgctatctgtcatatatgacggttgatgacatcaccgacatgatcggagagctggagcgggaatttcagcttgccgttttgcataaagtcggtaaaacgaaagccactctcgcaatgaataaaatggataacgacgatctcgccgcattgctggaagagatggatgaagaactgaaagaacagcttttatccagcatggaagctgaggaatcaaaggccgtacagcttttgatgaattatccgcaagaatcggcgggccggatgatgacgaaccgcttcgtctggattccgcagcattatacagtaaaagatgcggttgtgaagctgaaaagctttgcagaaatcgcagaatcaataaattatttgtacgtgattaatgacagcaagcagcttgtcggagtgctctcatacagagatttaattctcggcgagcctgaggataaagtgcaggatctcatgtttacgcgtgtcatctcggccggggtgctccaagaccaggaagaagtcgcccggctgatccagcggtatgactttttagccattcccatcgtggaagaaaatcatgtgcttgtcggtattgtcactgtcgatgatattattgacgtcgtgattaaagaagccgatgaagattacgaaaaattcgcagcctccggtaaggcgattacatttgatacgaaagcgtacgttgcggcgtaccgccgtttgccgtggctcattctgcttttgtttatcggattaatttccggaagcattctgaatcattttgaagatacattgcaaaaagtagtcgccctcgcatttttcatgccgatgatcgcgggaacgacgggtaatacaggcacacagtcactcgccgtcgtcatcagaggactggctaaagaagaaatgaataaaaaaaccatctttaaactgattttccgtgaactaagaaccggtatctacatcggcatcgtctgtgcgatcgcgattacgattgtcgcaaccgtctggcagaaagacttaacgctcggttttgtcgtcggttcatcgctgcttgcaacgttgattatcggtacgatggccggaacgatcgtccctattattcttcataaactgaacattgacccggcgattgcatcaggaccgctgattacgacgctgaacgatattttgtccttattaatttatttcggcattgcaactgcatttcttcatgctttataaaaaaagtccgtctcacaggaggcggactttttttatcagcggtttttatacttaaaatgagcattaagctgtccttccagcatttttttgcggagctgcgggtcgtttttgagagcctgttctttttttcgcatgtcttttaaaatctcagccgtctgcacgccgtcttcccgcttgttggcaatatccatgagccgctcaacgtccgcgaaggaatactttctcgttccccgtgatgaacgctgcgggtagattaatttccgttcttcatagtatctgatctgtctgactgacaatccggttaattcgcttacaatgccgatcgagattacttttttatctttgtaagattgttcgtctgtcgtcatttttccacccctggatgtcttttactcatattatataagaaaaaaagagaaaaaacctgacgcttgtcaggttttctgacgcgaaatagaaaattttagaaaaaaagcggcagaaaaattgacaaggttaatgcatgctcctgtgccccgttttatgcttactgtacagacacaatgaggaggaaggataggaatggagaaagaaaaagcggtttcgctggcaaaagaaatcattgaattagatatgaaacgcgatgaaatgctggaggcgttcatgcagcttgccggggaacacgcttttccgctgctcagagccgtccagaacggactttaccgaaaaacatcataatctacagaagttttacaatggctttatacgtctttgatataaaagcgttattctgatcatagaataacggaaaacaaaggagggcgccatgagtcgtttgcttcaaaatgcattggacaaagagagaaaccattattccaaaaagcttctgcagatcggagtctatacgaaagaaatactcaattccatgacaattacggagctgagaaaggaatacgcgtatttttttcggaacattccctataaagaacggaacccttatacaaattaaatgatgtataagggtatttttttatataaaaaagaaggaattctgaaaaacggcacgaatagaatataaaacaaagaacgactcttatgaattgtaagggtttacattatttttttataaaaatcttaaatacggggtagatatgatgagattatcatttaacgaagaagaagtgatgcgttcgatgaatttgtacaaagtttttgcaagggctttcaagagtgtgtctgaacacagcatccgagacagtaaagaacacggttttaatccgactgaatttgccgttttggagctgctctatacgagaggaccgcaaaagcttcagcaaatcgggtcgcgtcttttgcttgtcagcgggaatgtcacctatgtcatcgacaagcttgaaagaaacgggtttttggtcagagaacaagacccgaaggacaaacgttctgtttacgcccatttaactgataaaggaaacgagtatttggataaaatttatccgattcattcattgagaattgcgagagcgttttcaggacttatgcctgaggaacaggaacagctgatagccctactgaaaaaagcgggaattcacagccagcatttgcttttccgttaaaagaaagcggatacagacactcttcttcacgaagagtgttttttttttctgttccggacagtagagcctgaagcggtttttgcataagctgatacaggtcggcatcattatttaccaatcataatgtgacatgccccatgccaaaatatgagggtgctttgaatataaagaaggtgaacatgtgagaagctgtctgctgtctatatggtacttacttgatccgctttatttcttctttacccggctgacgctgattgataaacggcaatcgaatgtattccgcgtccgtttgactagatataaaggaaaagaagtcatcctgagcgacggaaccagaattaaaaaaaacgacgtgttagttaagattcatcttcataatgtcaaactcctgaaagagctgcagcctattgaaagcgcggtcagaagggggattatgctatatcagaaggtatatcaatccatgcctcatttagcggattatattaaccagcataaacggaaagacgagattaagggagtcgtcggcattacaatgcttcataaaggagcggcgagactcggttttgatgtgataaaaccgtccagcggctgctacaggctgtttaagaaagcggcccatattcccattttatactttactgcaaaacagctcaccctcaaaaacattccttactcctgctatttatttatttccaaagaaaaattgatgtgcacgtatcagactgaaaagagctgacaaaaagcgtcagctctttctcttgatttgctcaagcacgattgaaagcgggccgtcctgcggattccggtaaaaatcataaaacggatctccctctgtcctgacgcggttcactactgtatcgatcgtataatcatcaggtgttaaagaggagttgacttcgctccaataaaggggagccgcaaccgttcccaattcgttgccccgggtcgaatagggggcgataatggttttcccttcggcatgctgcaaataatctaggtagagcctgccgtttcggtttttgataaaccgctctgtcgtaaaaagatccggccgcgtcctgacgcaataatcggcgatgagcattgtgaacgcacgggtttcttcataggtgaatgcttccggtgaaagcgggatgtaaagctggatgcccttatttccggagagcttcgggaatgacgtaatgctgaatgagtcaaacagctgtttcagcacatgcgcagcctccacagccatagggaaatcattccttgacgggggatcaaggtcaatgacaatctctgcgggcctttcggaatgcactgtctgaaacggaacgtgaaattcaagcgccagctgattagccagccataaaagtgacggtatgctgctgcatacgatgtgctcatggctcccgtcaaacacgcttgagacaaagtccggcgtgtagtccggtttgtttttttgaaaaaaagattcgccgggcgcgccgtgcggataacggatcaccgtgacggcccgatctttaagaaagggcataagaaaatcgctcattttcaccatataactaaggaaatctgctttcgttttttcacgttttttaaaaacaatcttatccaggcttgtgaactgcagcttcggcggcagcgttttagagtgaaggataagctgctgatacgtgcattccgtccaatccatttcaaactgaaaagacacaaaagatacttcacgcagcgtgtcctgcaatatggttaaatactgcacggtcatgcagatagaaggctcaagtgtatactcgccgcttttttgtttttttccgtgggtctccataatggttctgacggcgtttttttcttccgcctgcatgccgtgggaaacggaagcgatcgggacggcggtgccgtcttttaaaacagaggccgttacatacccgttcttcgggttaaacccggttaatagcacatgtgccgttttcatatgtttatacttctgccagtcgggagagcgtttattttccgcccagccgctggaagccctttttgctacgataccttctccgtcatggcggacgaccttgtcccaaagcgcatcaaagtcagtgtgttccggaatgtattgaatcgcttcttccgctaagtgatgagggcaggcgggaagatttgcttctttaagcagtttggaaagggcgcgtttccgtttcacatacggtaatgagacggtgccggcgccttccagaacgaggagatcaaatgccagaaagcggcacggccgtctatcagcggtgctttcaattgcttccttccgttttaaacgtccgcggatttgaagatgctcaaagtccgctctgtacggattgattaaatagacaagctctccgtcaagcgtaatggggaacctgtctttcatgtgctgaaaacaccgggccgcaaaagccgtgatttccggaaattgattcgtcagcgtctgtccgtttctgctggttaatgtaacgccgctttcgtctatgcggagaagacagcggaatccgtcatactttacctcatagcgccactcactgccttcaggcggtacagaggtcaaaatcggctgcatcgtcagcaccatgattaagacgttccggctttttgtctggtcgtcttctgctttttgcctccgccgcctgctgacgcggcgtcttttgtccgcgccggtgcagcctgttcgcgatccggccgcttcgtccggtcaatgcttgcctgaagcgcgctgacaagatcgatgacatcttcgcgcgggccggcagcagccggtgtcacgcccgcttcttcatgttcgagcttatcgttaattttagcgagaagggctttccggtatgtgtcttcgtattgttccgggtcaaactcggttgtcagctcattaattaacgtaatcgccgtctgcagctctttttcattaacggctgtctgctcgggaacgcccggcacatgtccggcatttctgacttcatccggataatgaatggattccatcacgatgcagttgtcatacacgcgaagaatcgcaagctgctgtttagagcggatcgtaatggaggcaatcccgattttacccgtcgttctcagcgcttcccgcagaagtgtataggcttttgtgccgttatctcccggcccgacataatacgaccggttaaaataaatcggatcaatttcctgcagctggacaaagtcaacaatctcaaccgctttttcttcatgttcctgttttacgtctttcaagtcttcgtctgtcataatgacgtatttcccttttacatactcatagcctttcacgatttcatcaggttccagacttttttcacatccggtgcagattttttcgtatttaatcggcgcatggtcttctttatgaagactgcggaattttatatctttatcttcagtggccgcaaagagcttgaccgggatattgacgagaccgaaactgatcgaacccttccacatcgtgtgcatgaataaaaactcctttttgtctttattgtggataaacgggtccgttccatgtgtagcaacttatgggtgatgcggcgcttcatggagcggctgttccatttcctcaggcgacaatggtcatcgcattcttattcatcgttttttcgcgtcgcattctctatttacaatcagtgaatcgataaattctttaaagcgctgaagtccctgaaaatcatcagcggtaatcaaaaagattatccaaaatcattccccgggaaatgccccgcattcccatgtagtgactgagaaaatttcccgctcccatatgaactgaatccgcggtcagccgccgcttatcgcgaggggtgatttttccggagaacttcagtgatataaccgccgccagacaagcaatcaggagacaggcgggacgttgtattgcgcttgtcattccctcccgctttaccgatctgaaacgactcacatttataacgggcatgtcttaaagatatttcagactcaaggttttgtgttaaaatcattcttaagtttcggaatatagacgtaagccgggagtgatagatcatcgaagatttcatcatatcaataatagaggcgtttaaaagcttatcttacgccgggatttttttggcgctcagtatagaattcatcccggcggaaattgttcttccgcttgcgggctattgggtctcaaaaggggatatgacgcttgccgggaccgtgtttgccggttcgctcggcggtgtttcaggtccgcttgtcttatatggaatcggcaggctgggcggtcggccgtttttgctgaaatatggaaagtatatatggataaaacccgaatccctgcagaaatcagatgatttctttcagaagcacggaggtttggtcgcgttcagcggccgttttataccgggggtcaggacgctgatttctttgccgtgcggcattgcgaagatgaatgtctgggtgttctctctatatacatatgcagcgatgctgccgattacatttgcttacgtatacctcggaatgaaactcggggaaaattggaaaagcgtcggttccattctcgatcaatatatgctgccgctcggtatattcattgtgttgcttctcattctttggatgtttttaaagagaagaaaacagcgggccaaaacagaaaaaatttctcaatttgttaaaaaagttaagcgttgacaaatgatgaaacaggctttatcatgagcgtataaacaaatatttcttgaaatcccaaaggggagtagcgtccggatattccggaaacaaagtcgtcaattcatggatcatatccatcggctttgttggcatgccaatcattcatgtctagcaagacctttgcc

SEQ ID NO: 52 - DNA, 32217 bp, Bacillus amyloliquefaciens
cggcacagccatgaacaataccgtccgccaagtcgggggttctatcggtacggcgcttttagtttccgtgatgagcagccaggccgcacacgccaatgcgtcaactccgggaaacgccgccctgcacggcatgaatgcggcatttgtcgtagccgcctgcatcgcgctggccggcttcctcttatcttttacattaaagaaaaaaccgcgtcagcccgagcagcagcaggccgttacgcggtaaaccaaaaagaacccgatcacgtatgtgaccgggttctttttttacttctcgattccgtcttttacttctttcaccatctgagccatggattccaggccgcctcctgataaataccatgtagctgaatcaaggtagacaacatggttgtttttcacagctttcaccgattttacataatcattttcaaccacttgttttgttgaagattttgtgccgatcgctgttccgcggtcaacgacaaacatgtaatcagggtttgttttggcgatatattcataggaaatgctttgtccgtgcaatgaggcttcgatgtttttgtcagccggtttgacgccgaacacatcatgaatgaagccgtatcttgatttagatccgaacgcgctgattttgccgtcgttcgccatcaccactaacccgtttttatccgtgctgcttgtctttttcttcagatcggcaatggatttgtcaattttcgcaagcttatctttcacttcattttctttgttgaagattttgccgatcacttcggtgttttgcttgaatctgtcaacgtagtttgtatagtcatcatcaagataaatcgtcggcgcgatttttgagaactctttataagaatcagattgtctgtgggcgataatgattaaatccggatcaatatccgcgactttttcaaaatccggttcttttaaaccgccggtattggcgtatttatcactattatatgaagataagtattttggaaggttttgtttcggaagccccgccacgtgatcctgtaaaccgagttcatccatcgtgtccagcattccgaagttgaatacgacgacttttttcggattcttcggcactttgactccttctttgttcagatcatctttgattgtgattgtttcttttgatttgcctgatgttttgtccccgtttccgcatgcagaaacaacaaaaatcgtaacgagcgcaatgaatagcaatgcgaattttttcatgattttcacctcatctggtttttaagaaaagtacacaccgatccgctgactgtcaatctcttgaatcgggatggtcatatcataaatatcttcaagcacggaggtttcaatgatctcctccgccggcccttctttgacgatccgtccgtttttcagtgcgacgatatggtctgaatacacggatgcgaagttgatatcgtgaatcactacgacgaccgtttttccgaagtcttccacaagccgcttcaacagcttcatcatttcaacggaatgcttcatatctaaattgttcagcggctcatcgagaaaaatatagtccgtatcctgagcgatgatcatcgcgataaacgccctctgacactggcctccgctgagctgatcgaggtatttatcctttaaatcatccagcttcatataactgagggcctggttgatatgcacccaatcttcatccgtcagtttcccttgggaatacggaaatctgccgaagctgaccaggtctttaattgtcagtctgatattgatttggttcgtctgcttcaagatgctgattttttttgccagatcgttgcttttgcaggccccgatctcttgcccgtcgaccgtgatttccccggaatccgtcttaatcagccggctcatgatagacagcagcgtgcttttccccgcgccgttcggaccgataaatgaggtgagcctgcccttttgaatggatagagacgttttctcaaggacggttttccctccgtattgtttgcttacatttctgacctctaccatgatttattctcctttaacagcagatagataaaataaatcccgccggcaaaattaatgatgacgctcagcgtcgtggaaaatgtgaacactttctccacgacgaactggcccccgacgagcgcgacgatgctgatcaggacagaacccgcgattaaatacgtgtgcctgtaggtttttaaaaactctctcgccagattgacgacaagcagtcctaaaaacataatcggcccgacaagagccgtagagacagacacaagaatggcgacgacaatgagcatctgtttcacaagcttatcgtaatcaatccccaggttgacggcgtgctccctgccgagggacagcacgtcaaaaaaccgcgtgaaccgccagacataaatgcctgtcagaagaaagacagcaccggcaaaccataaaagatcggtgttgatattgttaaagctggcaaacattttgtcctgaacaacctggaactcattcggatcaatcagcatctgcataaaggatgacagactgttgaacagcgtgccgaacacgacgccgacaagcagaaggaaaaacacgttccgcccctcgcctttaaacatgagctggtacaaaacgagtgacaagagcaccatcagcccgacggagatgacgaaattaagatttttgttcatcatgacgatattcattgaaccgaacaggaacacgatgacggtctgaatgagcatatacagggaatcgaggcctaaaatgcccggtgtcagtatgcggttatttgtaatcgtctggaagatgaccgttgaaaacgcgatcgctcctccggtgagcatcatggcaagcactttgaagcatcgtctcggcagggagtattcccaattgcccagtccgtagaacaggaagaatccgatacatatcatggcgagcgccgccagcagcgtaatttttttattatgactcatatgcttttctccttaacagcatatacaggaagatgccgctgccgataacaccgaccatcaggccgatggaaatttcgtacgggaagatgatcacccttcccaaaatgtcgcaaaacagcacaaaaacagcgcccagcagagcggtgtgaggcaggctgctcctcaggttgtcccctttgtaaatcgacaccatattgggaatgatcaaaccaagaaacggcagcatcccgacggtcaggatcaccagtgaagcgatgagcgacacgataatcagaccgatattgacgacgcgtttgtattttaggccgagattgacggaaaagctctctcccattcccgccaccgtaaatttatccgcatacacataagcgatgatcaccagcgggatactcagatataaaagctcataccggcctttgacgaccagtgagaaatccccctgcagccaggacgacaggttttggatcaggtcgtatttatatgcgataaacgtggcgactgaactgacgatattcccaagcattaaaccgacgagaggaataaaaatcgcatcattaaacttgatcctctcgagaattttcatgaacaggaaatttcccgccaacgcgaaaacgaaagcgatagacattttcacaagcggactggctgatgtaaaaagcattaatgaaatcaaaattccgagccttgcccagtccatcgttcccgcagtcgtcggcgatacaaatttattccggctgatctgctgcatgattaatccgcagatgctcaggctcatgccggcgatgataatgctcaccaaacgcggcagccggctgtcaaacaatgtacctgcctgttctttatttaaatgaaaaatatccagcggcgacaaatcttctacaccgataaatatagaagtacacgccaaaaccgccagtagcaaaagtaagtaacgtagcttcatgctgcctccctgcacccatcacaaacggtatgactgattgccaaacaactcccatatatcccactcgtaatgattatcattatcaacgacaattataatcttatcatctttccaagcgcagtcaatacagttttgctttcaaaagcggtcatccgcgggccgtacactaaattgtcttacaatcagtctatcaagaatttgcaggattttctataaccttcatttggctgcttatcattttttgcacatgatgacacgcttgagggaaacaaatctgacaaacagaggaaaaattcctccatgtaaatacaaatgttctccccacgtagaaaaaatccttgatttacatgtttgaaagagagataataaaaattaaatttgtgagaaaatttaaatattaggggatgtaaatcatgaaagttgtaaaattcggaggcagctctcttgcgtcaggagcccagcttgagaaagtgtttcaaatcgtgacggctgatcccgcgcggaaagccgtcgtcgtatcggcaccgggaaaacgcttctcggacgatacaaaggtgacggatctgttaatccgctgtgcggagcattatttacaaaaaggtgcagcgcccgagcttgccgaaacggtcattgagcggtacgccgccatcgcgcgtgagctgaacctggatttctctattatagaaagaattcgcagtgacctattcgctctcttaaacagctgtaaaaccaatcccgaacaatatatggatgcggtgaaggcgagcggcgaggacaacaacgcgaagctgatcgcagcctacttccggcgccagggcgtgaaagcggaatatgtaagtccgaaagaagcggggctgtttgtgacgaatgaacccggaagcgcgcaggtgctccctgagtcttatgatcatttgtaccgcctgagaaaccgtgaaggcttgatcatttttccgggattcttcggttacacgaaggaacatgagattgtgacgttttcccggagcggttctgatattaccggctccattctcgccagcggcttaaaagccgacctgtacgaaaactttactgatgtggacgccgtctattccgtcaacccgtcaatcgtgcggcatccgaaagaaattaacgaactgacgtatcgggaaatgcgtgagctctcctatgccggattttccgtttttcatgatgaagcgctgattcccgcatttcgggccggcatccccgttcagattaagaatacgaataatccggatgcgaaaggaacacgcgtcgtcagcagccgtgacaatacgaacgggccagtcatcggcatcgcaagcgacacgggcttttgcagcatttacataagcaaatatttaatgaaccgggaaatcggtttcggccgcaaagcccttcacattttggaggaagaaggattgacgtatgaacacgttccatccggcattgacgacatcacgatcatcctccggcacaatcagatggactcagaactggaacacaggctcgtcacccgtctgaagcaggaacttcaagcagatgaggtcacagtcaggcataatctggcgctgattatggtcgtcggggaagcgatgcgccataatgtcggcacaaccgccagggcatccaaagcactgtcggaagccggcgtcaacatcgagatgatcaatcaagggtcatcggaagtcagtatgatgttcggagtgaaagaagaacaggaaagacacgcggtgcgggcactgtatgacgaattttttgccggagtcttactctcataggacaccgcctcttttttctcttgtccactaatatcccttacaaagcagcttcttttacatattgtatggtatagacaatatggaggtgaagctcatgtcaggatattcaggagtcagctctttcgctttgatcgttgttttatttatcctgttgattattgttggtactgccttcgttggcggtttctaagcatcgctccgtctatatgaggacgctgcaggttttgacctgcggcgttttcttttgttttccgccgctgtccgagtccggccgcgcaaaaaaaagactgccgggaacattctcggggcagtcttttcctttgttcaggctattttcttctcacgtcattcctctttcagctacatggaattcagcctgatctgtctggcctgctcctgtcactgtaaaaatcgcggcggctgctaaacaaataacaaaccatttagatttcaatttcatacaaaccctcactcctttgtatttgtttccttgcctcttcgactttcagaaaatagtcagaagaaatcttaaagcaattttgttcatagtaatatttagctgcttctagtgctaaatcctctatatcggcgtataaatttttatcttccaggtaacggaaacacgcgctgattgtttcctcatccggtttcgcctgatacagagcctgcagccattcgaattttaccgtgtaaacgggatcgtctgtttctttagcatattcatatccccgcttgtgatattccgacgctttttctttttttccgagtttaaagtaaatgagtgtgattagaaaatatgcttgaggaagagaattgacgattctttgtgattcaaatgtatcaaccgcccgttcaaagtacggaatcgcttcgccgatgcggtcctgattgtagtagcacagtccgaggttatacagcgccctcccgacaagctgcgctttttgttctttttcggccatttgcagagcgtgctgaaaatgtttggccgcctgttcaaagcgcctttcatccattaaattgacgccgaatacaaaatggcattgaataatccggacgttatatgtgtcctgctccacgtaaatttcataagcgttttttatatgtatcaaagaaaaatacgtttgtttcatatgataataagcttcggccactttaaaataaaactccgcccgttccacatggtccgatacgaaggccagttttttctcagcttgtttataatatgtaatcgctgagataaattctcttttatcaaattcaaacatgcctttgaaaaaattgacgtaataatcgagaagccccttgaggccggcctggctgttatcaatgttatcaagaatttccgacagggtcggctggtcttctatcttcagtttttccagcggctccaagtagtccagcatcagctgatggcgaaattccatgagggaataataaagcactaagttcgaatcaggctccatatggtcaagctcttgtttgatctcggccttcaagatctccgcatccggcacgctgaatgttctgatgtatcggtaccactcgttaattttctgcccgactgctgaagaaggaattaacccgctcttcattccttcaccctccccatccaagacctgtttaccagttattttatcacgtttccgtctctttccatcccgaaaaacacgcaaactttgtttcggcagagcgcaattttccgagtggagttaaaacagacggcggccagacgggaccgccggtttcaagatgattcatttttcgtattcagcggaaggcggattgtaaaggtcgtgccttttcctttttcgctgtcaatatctatcgtgcccttgtgcatttcgacgagctgcctgacgatggaaaggccgagtccgtattcgccgtatgccgtattcgttctggacacgtccgccttataaaaccgctcccatatatgctcaatttcctctttggagatgccgatcccggtgtcttcgatttcaatcaccgtttctttatagccttcatacccgcgcagcgtgatgtctcccttttgcgtaaattgaatgctgtttttcgtgatgttgacgagaatctggatcagcctgtcataatcggcgaacactttgacgccgtcctccacttgaatccgcagctgattttgttttttctccgcctgctgattgagatgctctttaataatttcaaacacctcgatgagcggcagactgagcttgtccagtttgatttgctgggatctgattttttcataatccaggttttctttcacgagcctgagcatccgcttcgtttcttcgctgatcagcgagaagcatttctctttatctttttccgggatggtgttgctgttaagcccctccacaagtccgttaatggtcgtcaaaggtgttctcagctcatgggagacatcggcgataaattggcgcctccgcttttcaaggcggtcaatctgctctctcgattgcttcagatttttggccatggtgttgaaatcggacgccagcatgccgatttcatcgccgccgctgttcttgagcgaaatatcgtaatcacctgatgccacttttccggtcgcatccctcaatgtctgaatccgcttgacgtgaaatttagataaaagccagctcagcagaatcgtgatgataagggtgctgatgatcgcgtaaatcatatagcggttgacctggctgatcatctgctcgacacctctgacgggagacacgaacagcaccgcccctttaaattgatcgttgataaaaagcggctttgcgacaagcgatacttctaagccttccgtattaaaacggttcatctccgctctgatctgaacggttttcccttgcttcagcatgtgccactctttacttttcagcttctcgcgcggcggcatatcgtcaggaaaaaagtaaggccgctgatgttcatcaaaaataataaacctggtctcgcgcgtttttaacatgtcctgatacggatacaggcggcgcagatcaagatcgcggccgttcagctcacttgtgatctgctgcgcgtaagatgacagctcatccactttattttgatacgcaaaatctttcacaaagtgcgaaaacagggaaatgatgatgaaaaaggccaaaatcaaaatgctgacatggcttaacagcagctgatataagtatttaatcctcatcaaatttgtatcctaccccccacaccgtgtataaaaacggtttttcctcactggacagttttttgcgcagccgtttaatatgaacatcaaccgtacgttcatcgccgtaaaattgatagccccacacctgctcaagcagctgctctctcgaaaagacctggcgcggattttgtgcgagataaaagagcagatcgaattccttcggcgtcagattctcgacaggttttccgtgcagaaacacttcccgcgtcttcttattgattgaaaaacacgccgtttcgatcaattcgtcactttttacggcctgccccgtcgcccggtatcttctgatcaccgctttaatccgcgctactagtgtcagcgggctgaacggcttggtgacataatcgtcggcccccatttcaaacccgatcacctgatcagactccgtgtcctttgcggtcagcataataatcggcacactgctcgtctctcttattttccggcagatcgtcactccgtccatggatggaagcataatgtccagaatgaccaaatcccagtcctcttccgtgaaccgctgatagccttccactccgtcatggacaaattcggcttcaaacccttctttaaaaaagaacatttccgtcatggtgcatacgcttatattgtcttctatcattaatatcttcattggttcctccgcttatcttgacgctttttcttataatagcaccattttactcggatgttttcgggtttcacaattgttagtttttatttcatcacccggaaatagtttgttcatatttttttcatacatttctcctactatatacatatcggatgaccggtgctaaagaaggccggttttacaagatctgacacccacacggaggaacagacatgaactttataaaaagagccttttggagcatgaaggaaaaaaagggaaaaacatttttgcagctggttgtgttttcagtgatttgcatttttgtcctgtccggtcttacgatccagtcagcggcaaagaaatcaagcgaactggcaaggcagcagctcggcgggagcgtcacactccaggctgaccgccaaaagcaaatggcgcagcagcaaaaagacggtgaaaagaggacgtttgaatcaacgccgatttccgtctcagatgccaagaagcttacatctttacagcatgttaaaaattacaacttcctcacgacagcgtcagcaaatgcagaaagctttgatgcgataaaaagctcaggcgaatcagccagttccggcgccggccgttttcaaggcggcggaagacagatgatttcagcggatatctcgatcgaaggcgtgctctctacggcattgcttgatgatttcacaggcgggagttcaaaaatcactgacggacgcgctatcacaaaaacagatgcggacgcaaaagtcgccgtgattaatgaaacgctggcagaccaaaataagctgaaagtcggcggctccattaccgtttcctcagcagcggatgattctttgaaaacgaagcttaaaattgtgggaatctataaaacaacatcatcaggagacgatcaggcacagcatttttcattcttaaatcctgacaataaaatctacacgccttacaccgccgcggcggcgttaaaagggtctgataacaaaaacaaaatcagctcagccgtttattatatggatgatgcaaaatatattgactcattcgttgcggctgcgaaaaaaacatctatagatgataaaacctacgcgctgacgacaaatgatcaggtgtatcagcaaatggccggtccgattgaaaatgtcgcgtcattttctaaaaacgtggtataccttgtatccatcgcgggcgcggtcattctcgggttgatcgtgatgatgtcgatcagggaacgcaagtatgaaatgggtgtcttgatggcgatcggcgaaaagcgctggaagctcatcggacaattcttaacggaaattctggttgtcgccgttattgccatcgggatcgcatccgtcacgggcagccttgtggcgaatcagctcggaaatcagcttctttcccagcaggtcagctcagccgatgattcacagcagcaaacaagcggctggggcggcggagaaatgccgcggggaggcggcttgttcggtcagcattcatccggcgcggatgtcatcagtacaatgcaggtaaacgtctcgctgaatgaccttctgattcttggcgggatcggcgtcgcaattgccgtcatcgccacattactgccgtctgtatcagtcatgcggcttcaccctaaaacgatcctgaccaagcaggaataagaggaggcagcataatgagcctattaacctttcaacagaccggctactggtaccaagacaaatcacagccgctgtttcaggatataacgatcagctttgaaaaagggaagttttatacaattgtcggcgcctccgggacggggaaaacaacgtttctgtctctggcgggcggccttgatacacctaaagagggaagcatcctttataacggagaagacatctccaaaatcggattaaccaaattcagaaatcaatatgtctctatcgtctttcaatcttatcatctgatcccgtatatgacggcgctccagaatgtcacaacagcgatggagatcaccggctctaaggagaacaacaaagatgcgttcgcgctcagcatgctgaaaaaagtcggcatcaccgaacagcaggcccgtcagcgagtgctgacattaagcggcggacagcagcagcgcgtttcaattgcgcgggctttctgctgtgacacggatttgatttgcgcggacgagccgacgggaaatctcgacgaggatacgtcaaaggaaatcgtccggctctttcaggacttggcacataaagacggcaaatgcgtcatcatggtgacgcacgacgaacaaattgccaaagtgtctgatatcaacatccgcttatcaagaggaagtttcacggtcaaagaaaacggcacggccgtttcctgataccgcgcccctgccagcgcagacaggggcgcaccctatatccccctattcaatagaagtgaacgtaaaaagagcgagggctgcatcccctcgctctttttatttatatcagctgtaaataacggtcaatatttgattgtccggctgctttgatcaattcttccgccttttcctcttcccccggcaaagcgagccggagtttgtcttcaatgtctttttcagaaaggccgtttcccggcgctcccttcggacagtcgatacgtgtttcatagacatgaccgccggaagccgtaacccgtacaattgtaaaacggcccttcggaacggcgttttcagccggctgaatttggtcatcgcagctgcggtgaatccgctcaaatcctttttgaaaggattcaggaatcggctcggatgtgaaatgttcaactgaaaaatccttaccgtgcaaagctaaggtgatcacatattccacgctgaatcttcccgcttcgcctgttttcggacgccgttctgtcaatgcggcgtccccgcccggcggataaatcacgtcgatccgttccgtttggccgaaagtgagaccatgttcggccttcagcttgagaatggcgtccgccgcatgatgagccgccgagcaaaacggataaaccttaaaccaaagtcccgggctcacaatccgccaagggtttccccacctgtttacaagcagggtttctgcccgttcaagatcgccgtacagtccgaaaaaacctttctccccgtcgagcgcatgaactgagccgccgaaaccggcctttgcaagctttacggcgaacaatccggcttgagcggccagtcctgcgtggagcggcttcatttctgtcccgaattgcactctcatgcctccggaacgggcggccgcaaacccgattgctttctgcaattggatttgattcagattctccgcgaatccgacggcgcatgcggccgcaatggcacctaacgttcctgtattgtgccagcctttctcgtaatgatgccttccagctgactcgccgatccgcgccatcacttcgattcccgtcacataagcaccgagaaagcggcccttgtctatacggccggctgatgcggctgcaatcaaagccgggaggatgactgcgctcggatgtcctcttacatcagaatgaacatcgtcaaaatcaagcgcatgtgcgatgaatccgttaatgagcgcggattgggacggcgtggttttttgatttctgccgataagcggcgctatcggcaccccgccttcttcttcggccagttttaccagcttttcaactcctttatcccgtctccccgcaaaagctgccgctgtaaaatcaagcagtcctttgcgcgcttctttcatcgcttcagcggatgtttccggcacagacgacatgacggcctcagcaagcccggccgtcagattttccgtattcattccgtctgctccaatacattgacggcaagccgggcgaaaaactcagccgctgccgggagcgctttttcgtcgagtgtgaaggcgggatggtgccattcttctgttccgtttgttcccatccagacgaaaaagccggggattttttcttgatataacgcgaagtcttcgccgccgggcgactgttctgcccgaacggtctgaagcccgagatcttcagccgtttgttccgccgcctggatgaaacgggcgtcgttcatcactgtcggaaggtaaggataccaacggaattcggcttctgccccgaacccggctgcgattccttcggcaacccgcttcatatgtttcggaacagcgtcacgcgcatccttttgaaacgtccggacggtgccttccatttcaacatggtccgggatgacattccaagagctgccgccttgaactcttgtgatgctgacgacggcattgtgaagcgagctgatatttctgctgacaactgattgcaggccgccggtaatctgccctgccgcctgaatcggatcaatgctgttatcagggattccggcgtggccgccttttcctttaacggtgatttcaaagcggtcgacactcgccatcagcgggccttctttcagaccgaccgtaccgacggggaggtcaggtttgttatgcatgccgaatatcgccgatacaccgtcaagcgcgccggcttcaatgacctgtcttgctccggcggcgatttcttccgcgggctgaaaaataaaccgcaccgttcctttcagctcatgctttctctcttttaataaaaaagccgtgccgaggatagatgccgtatggaaatcatggccgcaggcgtgcatcacgccgctgttgcgcgaagcaaacggaaggtttgttttctcttcgatcggcaatgcgtcgatgtccgctctgacggcgatgacggggccgcttttgtctcctttgatttcagcgatcactccggtttgaagtttcggcatatcaagaaccgtgattccttcttcctccagccagcggcggattttattcgtcgtttcgtattcctcgcctgacagctcagggtgttcatgaaggtcgcggcggatattgattaaacgtttgtttaatgattcatacgtttcatttgccatttcttcttcttcccttcttagacaagttcggcgggctctcccacttgcttaatgaattttttcgtccgttcgttctgcggattgtcaaacagctcttccggcgttccctgttcgatgatgcgtccgtctgccataaaaataactttgtcggccacttcacgagcaaaagtcatctcatgcgtgacgatgatcatggttgtctgtttttcggcaattgatttgatgacttggagcaccccggctacaagctcagggtcaagggccgaagtcggttcatccagtaaaatcgcgtgaggatcaacggccaaggcgcgcgcaatcccgatccgctgctgctgcccgcccgacatcgtaatcgggtagctgtccgctttgtgttctaaaccgacttgccgcagcagatccataccgatctgttccgcttcttttttcggtttcttttgcgcggtgatcagcgcctctgtcacattttgcagggcggttttgtttttgaacaggttgtaattctgaaacaccatcgccgtctgctggcgaagcttatgaacgtctttgcgcgaataggacgctgcattcagttttgcatcaccgatttcaatgatgccgtcatccgggcgctccagcagattcaaacaacggaggagcgttgattttcccgagcctgacgggccgatgatggccgtgacttcgccgcttttgatctcaagatcgatcccgtcaagtacggtaaggtctttaaatgcttttcgaatatgtctgacttgtatcatcctgagcctcctcctatgtgcgataaggcttgctgatcgcccgttcgagcagatcctgcagcacactgtaaataatcgtaagaatccagtacatgaccgcgacggctaaatacgtctcaaaatatttgaggttgcctgatgcgtacatttttccttgggcgaacatttccatcactcctaatgtaaaggcgagcgatgtttcctttaacaggccgataaacgtatttcccgtcgcgggaagcgcgtttctgacggcttgcgggaaaatgatccgtctgtacgcctgggattttgtcattccgacagacagacaggcttcaagctgcccctcatcgactgagttgagcgccgcgcggaagatttcagccaagtaggcggcattcttcaggcttaacccgataatcgccgcagttaacgccgtcatcttgctcattccgggaaagagctggggcaggccgtaataaattaagaaaagctgcacgagcgtcggcacgccccggaaaaatgaaatatacacctttgacagctggtgaagcacaggaacacgattttttgtgataagcgctaatataaggccgccgatcacggcaaataccatggccgcgacggccattagtaatgtgatcggcaaggcttcgattaacgcgggaaaagctgaaaacataaatccccaatcaatgctgttcattctcgattttcaccgccgtttcttaatgctttgcttccgttgtgatgtcttctttaaaatacttttcagacagctttttcagcgtgccgtcttttcgcaggtcttcaatggctttgtttacttttttgcggattttatcgtgagccgcatctttcgcaaacgggaaagcgactttttcatagacaatcgggtctcctgctaatttcagaggcagacctgtctttttgatctgggcgatcaggacgctgcggctgttcacataagcgtcaacccgtccgtaagccacgtctttcagcgtaccttcttgtgtttcatacgttttaatgttgatttttttatccgggtccttgctctcaaggtttttcgcgtggtttgagcccagaacggccgccactgtttttccttttagatcgttgactgatttgatgtctttgttatcgtttttgacgacgatttgagtgcccgcatacgaatacggttctgtgaagttatacgttttcttgcgttcgtccgtgacagcgacctggtttgagatggtgtcgagtttgccggtctggagctctcccatcagaccgctgaattcaagcagcttccagtccagtttcatgttgatttttttcgcgacggcttccatgacatccacgtcaaagccggtcagcttgccgttttctttatatgcgaacggatagctttgccccgtggcgcctacatgcagtacgttatcgccgccttcgctttcgtttccgtttccgcatgctgttaagaccgccaaaagcgcggcagacagcagcaaagcccatgttttcttcttcattgaaatcccgccttttcctattaaaatgttaatcctgcaattgtttttttaaataaatggtgatgtgcccttttcctaaatccttttcgcctgcacggacgtagcctttccgctcgtacatgccgatcagccacggatgcttgtccgctgtgcctagtgacacgaaaggcgcttttaatgtatcgcggagcactgtattctccagccactccagcatgtctgagcccgtccctttttttccggtttcaggatcgacggcgaaccaccaaatatgagggacaccgtacggcccgggattcggcccccacggcatccgcagagaaatcgtcgccagaatccgtccgtcttcctccaaaacgtaacaggcgtttttttgtatgttattcaaaacgagctccttatccgccgttgctgcggcaaagttgatgccgagcttgcggatcggttcatacgcccgcagtgtcagtgaaagcagctcatcagcgtctgcctccgttgcgagccggtattgtcttgacatgatgagccctcctttagtcggcatatcggtttgccggtttttccagtccgaaatgttctctgagcgtcgttccttcatactcttttctgaacacgccccgttcttgtaaaattggaatcactttgtctacaaaaagagtgagaccttcaggcaaaagcggcggcatgatgttgaaaccgtcacaagcttgttttccgacccattcttccatcttatcggcaagctgttccggcgttccgacaaagatatgatggcctcttgaacccgccacatatttgtacagctcgcggatggtcatgttatcgcgtttggccatctcctgaacgagcttgaaccggcttttaacggcattcgacgcatccgcatccaattcaggcagcgggccgtcaagcgggcaggcggaaaggtcgacgccgcccagatagttttgcagaatgttcaggccgacagacggaatgatgaggtcttggagctcttcatattttgcctgcgcttcttcttcggtatcggcaataacgggaaaaattcccggcatgatcgcgattttttcaggatcacggccgaaagaagccgcttgttctttaatagattgatagaattcctgcgcggactccaaatgattttgcgcggtgaaaatgacttccgccgttttggctgccagcgcttttccgtctcctgatgatccggcctgaataatgactgggcgcccttgtggtgtgcgggcgacatttaacggccctctcacggagaaatatgttcctttatggttcaattcatgcattttgtctttatcgaaaaatgctcctgattctttgtcacggataaaggcgtcttcctcccacgaatcccataatcctttgacgacttcaacgaattcttccgcgcgctgatatctgagatggtgctcaagatgcttttcgccgctgaaattaagcgcggtcgattcaatcgaagatgtgacgacattccagcccgcacggccgttggaaagatgatcaagcgatgcaaattgtctcgcgatatggaacggttcgctgtatgtggtagatgcggtcgccgtcagaccgatgcgggatgtgacctgagcgagcgccgacagcagcgtaaacggctcaaagcgcgtcagcacattcggatgtgatttgccgtctattgataaactgtccgccaaaaacagcatgtccaatttcccccgctcagctgttttcgccagttctttgaaataatccaaattcatgctcgcgtccgccggtgcctgaggatgtctccaagaagcgacatgatggccggtgcccgcgagaaacacaccgagtttgatttcttttttctttgtcatgatggatctccttctattctgaaatacggttcggaaaacattaacaccactaaacctatatttcctagtaattttataagaataaatcaaaatgtacaattgtcaggcaagtttgtcaatgcattaagacaaaaatcatgatatttaaaataacccggcgcaccggccgggttatttcttcgaaactgtatagacggtccctttgacctttttcttaataacggcaatgataagcagcaaaacggggaacagcacttgaaacggaagatgaatatagatcggcacaatgtttaagccttcattcatgtgttccgaaaaattgcttgcgatgctgatggagagaatcagcacccccaatccgaccgggaaggccagctgggacggatttttttctttaaacagcgtggacacgcccacgacaaccgcatatgtaaaaaggctgactttgaaaaaaccgccgatgacgagcacgagcatgaaaaagacatccagccggtctaaaaactcttccactttaattgtctgtatggtgctcagcagcggaaattgagagcggagcattaagttgacgtccagcacacaaatattaatcgccactgacatcgccaaaaacagcccgctgatgataatcgccataaatccggttttcttcacctttttccgatcttttaaataagggaaaatcatgacaaacacgattaattcaccgaacgggatgaacatcgtctgtttaaacacggaataaatgaccgttcctgcaccctccgctaaaacgggctggagaaatctgaggtttatcgtgcctgagctgataatgaggatcagcccgacggctgtcaggaaatacataatgccaaacagcagctcgccggctctcgctatcacttcaattccctttctgaccgcaaatatcgcggcgatcatcagcatggcattcacaattaaaatcggcgtgtcctgataggcgaaggtgacaagcatttcgccaaaatcccgcaatacgcgggcggcgatataagcaaaatagagaatataaagaagggagaccgcccagctcagatgtctgccgatcagttcgttcatgtaatctctcggagaagactcaggaaaaaattgatacagcgcctgataaacgtagaaaagtccgagaccggtaacgcacccgagaagcacggacagccacgcatcccgcccggccatcgtgcccggcgggatcaataacgaactgcccaattcaaacaaaatgatcataataaacagctgacgcgtgccgattttcgcattttccatacgcttcgctcctttctcctcaaatcaatcatgctcaagcttgtctgagagaggattattccgcaagcccgttcttctgataatgacttccgttttgacatctacggggagatttgggaaatattcttcatcccacttccctttgaactttttccatttgtccggatgcttccgatagatcaggtctccgaagccgacgaagtcattcttatgggcttttatatcttcaatcgatttggtgatatctttctcaagctgcacgctgagcgccttttgcatcgtcatcagcacttgcggatcagacagatggaaagggtatctgacagcgtccaccagcccctcgacctgagcatgcacgtgaatatgcggttttccgttcggaaaagtggccgtcacctttgtattctggcgggtgacctgcagactgattgcatgcttcacgttcttccaatccgcattgatgaacgtatgcttgatcctattgagcagccatacagcccccacactgtcgtcatcctcaatccagtaatccagcctcccatcctttttgaacaccgccagtccgtccgctgacagcactgctttcggttcagttgtctgcgtattttccatcgtaggaccggctttatcgtctccgtgcatttcataaccaggaataaacggcgacccggtcggagaagcgagatcaatcagaacgtcctgaaggctggttttaatgactctgccgtattgttcctgcgtgaagctgagcgtcttgttcactttattggaagggattttatcaatcggcgtcagcactttaataatgtcttccgccttggaattatgcgcaatcacaacggttgcggtcgtcctgaattcggtgtcgcggtcaagattgtccagaataaaactgagcccttcctctttcgccagtttttcactgaacaccacgagatttgtatgcgcaaaatagagcctcctggacactttcatcgagccttttctcaaagcttccgtcaaattgtctccggacaccgaatagacggaaaccggaggccggtctcccgctccgccgccctgcagaccgccggccacgtttcccggattgataatttgaaagtgaaggacgtactttcccgtttcggtccggtcaataccgatggcggagatcaccgctaaatcggtcagctcccttttatcccagcatccggatacaaacataagggaaaccatcgtacaaaggataagcatccatttacgtcttttcattaccgtcgccctcttctacatctttattaaccattcctctggatgtctccggtttcggtctttgatgttccccttggcgcctgttgttttcctgcacgagcagtcccggccttttttcatccgcccataacggagcgcggaggagggaatccttcagtccgcccggggttaaaggagcgagcggggacatatacggaaatccgaatgaacgcaggccgcacagatggacaaacatcatgataatgcccagaatcagcccgtaaaatcccatgaccgccgccgacagaataaagagaaaccggatcagccgcgcagatatcgccatgtcaaaagccggggtcgcaaagctggcaatcgccgtcagggcgacgacgataaccatggccggggaaacaatgccggcctgtacggcggcctggccgatgacaagcgctccgactatggaaacggcggagccgacaactctcggaagccggacacccgcctccctgagaatctcaaaggccacttccatcgtcagcgcttcaatcacggccgggaacggcaccgtctcccgctgggccgcgatgacaatcagcagctgcgtcggaatcatttcctggtgaaaggtcgtcgccgccacataaatccccggcgccaccagtgaaatgaagaagatcaaaacccgcagcaccctgatgctggtggcgatatcaaatcgtgaataataatcctcaaccgattgaaaaaattgaataaataaggccggcgcgaggagaacgaacggcgttccgtccactataatcgcaaatcgtccttccagcagattccccgccacaacgtccggccgctccgtatgatatacggtggggaacacagaaaacggcgcgtcttcaatgagctgttcaatgtagccggattccagaatgctgtcgatgtcaatgtgcttcagccgcttgcggacttccttaatcagctttttatcgcaaattccgttaatatacatcagcgcgacatccgtattcgtttcgtgtccgatctccattttttcaacccatacatcaggcgtttttacatacctgcggatcatggaaatattggtttgcagagattcagtgaatccctgccgcgggccgcggaaagagacctgagtgctcggctcttgaatggaccggtgctctcccccttccgtgctggcgatcagcgccttgtcagccccgtcgacaaaaatgagcgtgctgcccgccaccagcccggcataaagacttttccatttttcctcctctttcaccccgccgatcgcaagcgttttatcgtatatcaggcagaccgcttgttccggctgaacggacgggatgtcgattaaatcctccagaagggattggctgacaagctgttcgtctaccaaaccggcgatatacacaattgcggccggaagctcttcttttccgattttcagccggcggatgacgacatcggcactgttgccgaacctctcagacagcttcttcatattttgctttaagctgagggagatcggctcatcccgctctttgtccggctggctggccgcttcttttctgtcttcattgtcacggtcgttttgatcggcttttttttgtttcttctgcttaaaaaatggcggcatatcgcaaaaaacctttcctcgtttttttcatattcttcctgtacggcaaaagattatgcacggcggaaagtctgtataaattttgcgtaatcgaaaaggataaaaagggagagtgttgctcatgaaaatattgggagtttcattttttttgctggctgccttgctggtgatttcactcgcgatggatatgctacaaggtttcagtttctatggagcggtccaaaacaacctgtccgcttttaaattgaccaccttctcagaatggctgatgctgtttttattcgccctctttttaatcagagaaatgatcgctttatataaatcaggtaaaaaagatgcctgacaggcgcacggctgtattgtgtcaaaaaagaacacatccctccttctctcggagttcatgtgttctttttatttttccggcgcagattgttttcagatgacgatatttccgctttccgtatctgtcgtgtgtttcacaatgacgcctctgattatgcggttgccgatgattttggtgcttgcggaggaattggtttggatggcggaagcagaagcggcggaaaggttgttgatggtattgcccgacacgagggaattggaggctccgttcagatagatgccgatcgggctgcccgccgttcggttgatcgtgagcgtattgtctatgacttcatgcgtgcctgagttcagatacacggtaacgacgagcggtgatgattcaaagcggttgctgatgacagaggttcccaaggatgttgaactgaatacgggatagtttttatagttcttaaagagattgcctttgatgacagccctggcttcatttgttacagatacggcataggactccgcggcgccctgatacgcattcggaatgagcgtatttccttcaataacggcatttccgcctgtgacccatatgccccggctgaacgatttcagcacattttgttttacggtgatattgccggccgacatgctgattccgtctgtcacctgattcagagtgttattcgtaaaaacggcgttttccgacagcgtcgcccgcatccccgtgcttcgtctcgtttcggaacgtccgttttcaatgacattgccgtcaacggtcacatcttctgcctgatagacggagatgcccgtattttcaaattgattgattttgttgtgggtgacgaggacgctttttccccttacatctattccggtggaaaaaccggtaatcagattgttggaaatgacggcattgctgctgtcctgtccctgtgacacaccttgtccggcgactgcggttcttgagccgccgtctgaccgaaagaagacattccccgaaatgacggtatgtgccccatacccgtagctgattgtgttatcggaatgatttccttcaattaacacattatatccgttaaaattggtgactgagcttgcggcgtttccggagaagaagttgttgcggaccgtaatatgaagagcttcctcataatcaatatcgccttctccgtacgattcaatatcgattccgaatttcggagccgttccgttcccttgcccggcgtcttcaatcacgcattcttccaccgtaacggtattgcagccggtgattgaaatgttgttccgccttgactgcctgacctcacagcggcggatggtcacctgttctgaagtttcgtaatcactgtttgtttttaacccgagcgggctgacaattatgccgtctcccgtaaaatccgaaatcttcacattttcgatcagcacattgctgctgccttcaatacagattccaaacccccattcatgggtcgaccgcaaagggacattggtatacgtgtgttcatcccgttccccgatgatccggccgccggtgatggtgacattttcacgcctgcctatatagaaagccgagtagccccaggagctgttcggcgccactttaatcgtgcattccggatctaaaacgatggtgagatggctcggcacgttaatcccggcgttccgaaacggctggcttctgtccccgccaagcgtgccgttgattttatacgttccgggcggaaaaaacactgtatgacagccttcgcttacggccctggccaagcattgattgatggctaccgtcacgtcggtttttccgtctgccgccacaccgcaatccgtaatatccaatatacaattcggcaagtaataatctcctccttcctctcttattgtcatcttattccgccatatcccgctccgcctgtacatactttaaattttattaaaaaagtttataaagatagtttcgtcagataatataacaaaataagtcattggaattaggaagattcgtctatattcaacgttttaatatcttttcattctggaattttttgaattcagtataaattatattgacacaagtattatataagaatatgatttttgtaatacacttttttaagaaagggttggctcaggtggcatctattgataaggactctataacagaaactgtgccgcaaagaggctttttcggtcatccccgcggcttgtttacactgtttttcaccgaattttgggagcgtttctcctactatggtatgagagccatattgctttactatttatacacggaagtcgctcatggcggtctcggctttgataaaacgaccgcagttgccatcatgtccatatacgggtctctcgtatacatgtcgagcgtcatcggcggatggctggccgaccgggtattcggcacggcaaacaccgtattttacggcggaattttaattatgttcgggcacatcgctcttgccttccctggcagcacggcggcgttttttaccagcatggctctgatcattatcggaaccggcctgcttaaaccaaacgtatccagcgttgtcggagatttatatacgaaggaagacgagcgccgcgactcaggtttcagcatcttttacatggggatcaacctcggcggattgcttgcgccgctaattgtcggaacactcggacagaagtacaactaccacttaggcttcggatgcgccgcggccggtatgttcctcggactgattgttttcgctcttacgagaaagaaatacctcggcaaagcaggctccaatgtaccgaatccgatttctaaatcatcagtgatcggcacgggaatcggagtggtcatcgcagcagccgttatcgtcgttctgattcaaaccggctggctgacgatccagcgtgtgattgacaccgtcagtatcctcggcattgtcattccggttatttactttatcgtgatgttcacgagcaaaaaagcgacgaaaacggaaaaatcacggcttgcggcttatgttccgctgtttattgcagccgcaatgttctgggcgattcaggagcagggcgcgacgattcttgctttatatgcggatcagcgcacgagactttcctttgcgggcatgcatcttgagtcttcatggttccagtctctgaacccgttattcatcgttattttcgcgccggtgttcgcgtggatctggatgaagctcggcaaacgccagccttcaacaccgattaaattcgcgatcggcattatccttgccggattatcatttttagtcatggtgcttccggttatgggcggaagcggcgagcttgtgagcccgctttggcttgtgctcagcttccttttggttgtgcttggtgagctttgcctttcaccggtcggtttatccgtcacaacgaaacttgcgcctgccgctttctcagcgcagacgatgagcatgtggtttttaacaaacgcctgcggtcaagccctgaacgcaaaagtagtcggtttgtttgataagatttctgaagcggcctacttcggctcaatcggtcttatttcgatcattcttggtattattttgattcttctatctcccgttattaaacgggcgatgaaaggcgtacaataaaaaaaaagcctgcggaatcgtccgcaggctttttttatgcgtctatcgttttaactcctcaagtgtttctctccatctcttcaagacatcttccggttcgtggagctggatggccggtccggatgtcagatccgcgtatttcgcccgatcttccttgacggtgatcacgcggcagctgaaccgttcccgctcgtgtttcgcctctttcagcggcggaagcgcctcacattccaatgtgacgtaatatgcggctcctccgtgccaggcgatgaaaagagcttgtcccgaatgcagcaggctttttacggtcgtcgtgtttttccataaggcgagccggagatttgttctgctcacagccacgatttcaccggcgctgatcatagccgcgtgcggacggccttcttttgtcacagattgcagcacaaacgcgtcgtgctgctttttttcaagctccatcccgtctaaaagcgtgtaaagcgccttcggcaagtgctccgtcagcattacgcttttctttccgggacagcgggaacatgtgcggccgtctccgtttctttcggatcaattttaaatgccgggttgaatgccgccggattcgtgatgctttccggttcacaggatctccatgtgaaaaagcaggtttggcattggtaaatttcccaagcgcctttgaccggcgattggctgacggtttctccttttttcgattcacagcgcgggcatgttttcattgcaacctcatcctttcttattgattcattaagtccatcagtttttgttcccactctttcgttgtcagcggagaatcaagcggctgcgaataatggcctcttgtttccggcgcgacaggcgttgtggcgtcaagaatcattttgtgtgtcatccctgccggatcagaccccgggtcaagcggaaggacggacaggtcaggaatgatgactgcatcgtgtttcggatgcattttcgttgagagcgcccacatgacttgcggcaggttaaacggatcgacatcttcatccacgacaatgaccattttgcagtagccgagtccgtgcggcgtggtcagggcgcgcatgccgaccgccttggcaaatccgccgtagcgcgttttcgtggaaataatggcgatcagcccgtgcgtatacatcgcattcacggcgacaatttcgttcggataagcttccttgagctgctggtaaagcggcacgcacgtattaatgccgatcatataatcgcactccgtccacggcatgcctaagtataaatgttcaaaaatcggattgtttctatgatatacccgtttgattttgatcaccggcatgctgcggccgcctgaataatggcccgtgaactcaccgaaaggtccttcgtattcccgttttcccgcaaggatctctccttccagaacgacttcagcgccccaagggatgtctaaatcagacaatttagatttgacgattctgtagggctccccttgaatcgcgccggccatttcatactcggattgatcgtataacagcggagttgacgcagccgtcgtaatcaccggctcacagccaagcgcgatcgtaacgggaagattcacgccgcgttcttcagcttggcgaagatgaatcgcaatatcatgctgaggcacgggctgaatgccgagacggtcttttccctttacctgcattctgtaaatgccgacattttgcttgccgaaattgtccggatcttcaagatcgcgggaaatgacacacgctttatccaaatagtagccgccgtccccctggttgattctgaatagcggaaggatgtcaaatagattgatatcttccgttatttcattttcatgaaacggcgcggtttcttcccgtttgaccggcaccggaaatgcatcgtaccgtttggcaaactcaaagaattgttcttttacaggcgtatctttcggcatgccgagcatcatcgcgtgattcggccacgagccgatgacattcagagccacctgcgcatggtgatgtccgtaaatattgttaaacaaaagcgcaggggttttatccccgagattgctggctgcacgcgctgcggcgcccagatccggctccggtttcacctcttcgtttactgttaagagctgcccttctttttcaagagcggcgagaaattccctaaaatcctgataggccattatcagattcctcctttttgtttttcaattccgtaccaccgtttcgcttccggcagacggataccgaactgatcgagcgtccggaacacaatatggtcgatcaattcatccatgtcagccggcttgttataaaatgccggcatcggcggaagaatgacggaacccatttttgtaagcgctagcatattttctaaatgaatttggctgagcggtgtttctcttgtcagcagcacaagttttttccgctccttcaggatgacgtcagccgaccttgtcagcagattgtcagccattccggtgcggatgcttgccagtgatttcatgctgcacggagcgatgatcatcccgtccgtttcaaacgaaccgcttgaaatcgccgctgcctggtctttgtgagaatacgtataggatgcgagtttctcgacatcttttaacgtataatcggtttcatgtgtaatggtgacatttgcccaaggagaaacgacaagatgggtttcgatctccgcggcttttaaatattctaaaagcctgatcccgaatatggctcccgttgccccggtcattccgatgacgagcttcatattgacccctcctttacgcttgaaatgtggtgtcaaaaccatcatactcctgatatatccatatgaaaaatattcgttaaatctatgtatcataccttaaaggtataaaagaaaggagcgagcgttctcatggatatccggcaattgcgttatttcatcaccattgcccaagagcagaaaatcacgacggccgccaaaaagctccatatggcacagccgcctttaagcagacagctgaaacagctcgaagaagaattgggcgtcattctgtttgaccgcaataaaaagaaacaaatgacccttacatatgaaggaaatgtctttttgaaaagagcgaaagagattcttcataagtttgaggatgccattatcgaggtacaagagctgaaggaagaagtggccgggacacttgccgtcgggtcaaccatttactgcgcagcgctcatgcttgagaaagtgtcacagatgaaagagcggtttccgcatctcacctttaacatttgggaagatgaacccgtctcactgcttgagcttctggaaacccggcagattgacgccgccgtcaccaccaccttgattaaaaacgacggcattgaatcgaaggagcttgaagacattccgtgtgtattggtgctgtccgagcattcaaaacgaatgtgcggagaaacgattaaactgaatgacatcgcctctttgcctctgatccttttgcgcaccgtcaatggaagaggtgtgtatgaccaagtcctccaagtttgtgaacagtacggtctcgacctccaggttgtctgtgaatgccatgactccgcgacgctcttgagcctcgtatcatcagggttcggcgccacaattctgcctttgacgatgattcccgtccatatgcgctcgcatgtcaaaacggttatcatcgaagacaacccgtttgtcatgacaccggccgtcatctggaggaaagacagctacctgccgaagcctgtcagacagtttttggaattattttgatcccggaacacgaagaattcccgctcatgaaaaccaattacttgactcatactaaaaaaaagttatcctttacaattgggagctattttttctcaataaaactactcagaaaagtggggaataaagaagatgaaaaaagcattattcgctttgttcatgatggtcagcatcgcaatgcttgcagcctgcggaaactcacaggacagcggatctaagtcaaaagacggcgatctttgggcttctgtcaagaaaaaaggcgtactgaccgtcggtacagaaggaacgtacgaaccgtttaccttccatgataaaaagactgacaaactgaccggatatgatgttgaagtgattcaagaagtggcgaaacgcctcggtctgaaagctgactttaaagaaacacaatgggacagcatgtttgccggtttaaacgcgaaacggtttgacgtcgtcgccaaccaagtcggcaaaacaggccgtgagaaccaatatgatttttctgataaatacacaacgtcaaatgcagtcgtcgtgacgaaaaaagacagcacgattgcgaaagaggctgatgtcaaaggaaaaacagcggctcagtcattaacaagcaattacaataaattagcgaaagaagccggcgcgaaaattgaaggcgttgaaggcatgcgcaatcccttcagctcattcagcagggccgcgctgatctgacttacaacgataagcttgccgtactgaactacttaaaaacgtccggcaataaaaacgtgaaaatcgcgtttgaagcaggccagccgcagcaaacgtatttcgcattccgaaaaggaagcggcgaacttgtgactcacgtcaacaaggcgttaaaagaaatgaaagaggacgggactctttctaaaatagccaaaaaatggttcggcgaagatgtttctaagtaacttgccggagcccgtgattgcaacagccattccttgggatttggtgcagcagtcattctggccgattctttccgggggaatctattactcgattccccttaccattctttcctttattttcggaatgatcatcgcgctgatgacggcgctcgccagaatgtcaaatatgaaaccattgagatgggtgttcagcgtatacgtatcagcggtgcgcggcactcctcttctcgttcaattgttcatcattttttatctgttcccgacatttaatattacgctggaccctttcccaagcgcagtcatcgcgttttcattaaacgtgggcgcctacgcttctgaaatcatccgggcatctatttcatccgtgccgaaagggcaatgggaagccggttatacgatcggcatgacctatcgcaagacattgttccgcgtgatcctgccgcaggcgtttcgcgtgtccattccgccattatcaaatacatttatcagcctgatcaaggatacatctctcgcctcacagattctcgtcgcggagctgttcagaaaagcgcaggaaatcggcgcgcaaaaccttgatcaaatcttggtcatctatattgaagccgcctttatttattggatcatctgcttcttgctgtcaatcgtacagcacgtgatcgaacggcgtctcgaccgttatgtggccaaataaggaggtttcgatatgctttccgtcaaaggattaaataaatcattcggacagaatgaaattttaaaaaagatagatatggagatagaaaaagggaaagtcatcgccattctggggccgtccggttcaggaaaaacgacgcttctgcgctgtctgaacg

SEQ ID NO: 53 - DNA, 13441 bp, Bacillus amyloliquefaciens
gaaagagacacttctagcgtttctccggaaaaaccggaaacggataatcccggctgtgcaagcagaagacaagcgccgcagtcgtcgagcatatagcgcagcctgtcctcaggatagtcagggtcaagcggcacgtaggcgccgcccgcttttaacacggcaagcactgaaaccaccatctccggcgagcgttcagcgagtacgccgaccatgctttctttgcggatgcctttttggcggagccgaacggcgagcctgtctgtgtactggtcgagctcagcgtacgtcagcatgccgcccggaaaacggagcgccggacgatgcggcgaaagcgcggcgcggcgggcaaacagcccgtgaagcgtcggagccggcggttcaaccgtttctgtacggttaaacgcatccagcatatttctggcttcacacgcatccagcaatgcgatctcggaggcgctcatttcagggtcggaaatgactgacttcatcatatgccgtaaaaatgtttcaatattcttcataaaaacacgatcgtatataccggtatcaaagtttaagcggatataaagagaattttccggaatcacctttatgctgcatccgtagtttgtgacttcctccatcgtgaaatcttctaccgcaaaatcaaatgaaccggcctgactcacattttcaatttcacgctgggccggcacattttcaaacacgataatgtggtcaaacagcgcttgcttcagagggctttgcgcctgaatgtcatacagcggataatagctgtacgcttctgcttgcagcgtctcctgctgcaaatgcctgacgagctccagaaaagaaaatgaaccgcttttcacccgcacgggaatcgtattgataaacagtcctaccattttttccacgcctgcgagatccgacggccggccggaaacgacagaaccgaaaacggcgtcatcacagcggctgacacgctgcagcaacatgccccacagtgcctggaacactgtattcagcgttgctcccgcccttgccgcaatgttcttcagcccatttgtctgctcttccgaaatggtgaaaaccgcctgctcaagttcgccatttggttccgcggattttttcggaagagacgccgattgctcaagatcggcaagtctcatattccaaaaaatctcggcttctttacgatcctgcttcatgagccatttaatatactttccatatggctgaacaggctcgagagacgggagccgtccgtctccgagagattgatagatcatcagaaattccttcatgacaattccgaagcaccagccgtccatgacgatatgatgatggctccatatacaaacatagcgttcaggcgcttttttcaaaatggagactctcatgagagggtctgattgcaaatcaaagcctttatctttatcttcttttctgaaccggtcggcatatttgtcttgtgccttctcgtccaaatgagaaatatcatgaaactgaacgcggcttggtctgtttttcaacacgacttggcggggcttcgccacattcttatgaataaatgtcgtacggaaaatatcgtatcgttcaaaaacagcatctatacttttttggaatcgttcccggtcaagctgtccgttgatcgtaaacaccgcttgttcgaagtaggctcttgagtcatgatccaacagagaatgaaaaagcatgccctcctgcataaaagataaaggatatatatcttgtatttccggttgctgccccattgcgccactccttttctatagtttgttgacggctcccataatgtcactcagatcttccagcgttaactcctcgtcactgaaatcagcggcgctccattcacgctcctctttgcctgtgcaatgcgtgatgatctgcttgagaaaggcatgaaaatgtcccgtcaaaacttcaatcgtttctttttgatactgaaaacggttgtacacgacatgcatgctgagacattccgacgatacggagccgctgatatcaagtgtgtacggacgttcccagtccgggctgacttcatttcccgcttttacgggagaaacaccgaagccgctggaacggatttcccggtcgaactgccccagatagttaaaactgatttcaggagcatcagattcagtctcttcccagagtttgcttatatacttcagcaccccgtatcccgctcctttatgcggaatgcggcgcatcatgtcttttgtccgcttaatgtgatagccgagctgctcgccgtcatcagtctgatcttgaaaacttgcgtcaaccaataccggataaattgacgtaaaccagccgatggttctgctgatatcaagatgctccagatgctcttcccttccatggccttccatgctgattttgaatgtctcgtttccagtccatctgttcagcgcaaggcttaacgcggcaagcaataattcacccgtctctgttgtgtatgctctgttcgcttccgttaacagctgctcagtctcctgttttgtcaatgtaacggtcatcacatctgtatctttcagaagattggaagagatgcgggcatctttcggaagcggttcgaccgccgctttttctctttcggaccagtagtctgcttcctgtaacagccggcggctttttgcataatcagagatttgcttcgcgtaagtctgataggaatcggtttttgccggaagcgcggtttcttttccttcgagcgcctgcctgtagcatgcggtgagatcttcaaataaaatccgccatgacaccccgtcaatgacaaggtgatgaatggaaagcagcagatgatcgccatcattagcgtgaaataatccgacagctacgagcggacccgtctccagccgaatggaagtttgaataagggcggccgcctgttcaattgcggcgtgctcctcttgtaatgaccctttccctctcacgtcatgcgtttcaaacataaagagttcttcttcagaaaggttttccgctctgttatattgaatcaccgatccgttttgcgtgccgcataccatccgtaatgcgtcatgatgaaccgcgagctgtgccagcgcttttctcatagcagattcattgattctgtccgcactgcggagcataaccgactgattaaaatgatcatgcggcaatgattgcgacaagaaccaatgctggatcggcgtcagcggcacgtctcccgtgacgggagcctgatcaatcacgcggcggactttccggagccgcatcgatacttctcccagtgtctgatgctcgaacagctcgcggacggtcgtttcatagccctgctgtttcagcctcgcacatacttgcagcgctttaatcgaatccccgccgagatggaagaaatgagcattggggccgagtccttcaacacctaagagttcttcccagatgtcagccatcatttcttcagtttcatttctcaggctgatatcatctccaaggctatcatttaattcaggctgcgggagcgccttctcgtccagcttcccattcgccgtcaaaggcagttcatcaagctctatcaagcgggcgggaatcatatattccggcagaaaagctctgagagaggcctgaatctctgcttcttttatcttttcgtttccgtgtaagaccgcgtatgcgtaaatggagtgctgaccatgctgatcagcacgtgtgatcacggcggcctctttcacggaggaaagctcttgcagcgctgatttaatttctcccagctcaattctgtggcctctgacttttacttgcgcatctttacgcccgacatattccagctcgccatttgagagccttttggcgatatcgcccgtccggtagagccgcatgccgtgcggattcgtgatgaaacgggaggcggttaaatcatccctgtttacataccccctcgcgacgccttccccgccgatataaagctcaccgggaattccgatcggctgcagattcatataggcgtccatgacaaaagcatgaagggttcccagcggtctgccgatattgcttttgtttctctcaatatcatccatattcagttttttgcatgtgacgtgaaccgtggtttccgtaatgccgtacatattaacaagctccgtctccgggtacttttctttccagcttttcagcatgccgggctgaagcgcctctccgccgaaaatgacatatcgaagctgtagcctgtccgtatgcccggcctcttcatgaatgagtcctgaaaaagccgtcggcgtttggttcagcaccgttacgccttcactttgcagcagctgccggtacaaatgcggatcacgggcagtttctttcggcacgataactacctttccgccgtataagagcgcgccgaatatttcccatacagaaaaatcaaagcaataggagtggaacagcgtccagacgtctccagagccgaaatcaaacggcagtcctttatgtgtgataaggctgatgacattgcggtgttccgtcataacgcctttcggttttcctgttgtgcccgatgtgtaaatcacgtaagccggctgttcaggcgttatcatttctttcgttctgtctgctgaaacggattcaggcttatcgatgtataaaaccggcagcccgtccattccggatatcccaagacccgattgcgtcaacagaacacgcgcgccgctgtcagtcagcataaatgaaatccgctcgtcaggatagtcaggatcgatcggcagataagctcctcccgcttttaaaataccgagaatcccaatcagcatatccggagatcgatcggtcataattccgacaatctgtccggagcggatgccattttccgacagcatatcggcgattcgatccgccttttcattgagctcgcggtaggtgagacgctcatcagacatgacggctgcaatttgatccggcattttttccgcctgtgcttcaaataaactgacgatcgtttcatgcctcggatactccgccgtttgatttcccgcttgaagaagcatctgccgctcgtttgtgtccagcaaatgaatgtcagacagcttccgctcatcatccgatgcgatttgtcctaaaagctctttaaaatgaccggcccaccgttcgatcgtatccttttcaaacaaggcggtactgtattcaaaatgaaaatccagtgagccatccggccgttcctcggcatgaagcgtcaagtcgaattttgaaatgtcatgcttcactgcatgtgaagaaacggataagcccggaaggttcacttcgaaatcatcactgttttgcaaaacgagcatggcatcaaacagcggattgcgattgacttcccggtgtgtatcaagcttttgggcaagttcttcaaacgggaagtcctgatgttcggccgcgccgagggcgagcattttcacctcttctaaataagcgcggaatgtcttatcccctttcggcctgcttctcattgccacggtatttacaaacatgccgatgaccccgtcaagctcagcgcggcttctgccggccgcaggtgaaccgacgacaatgtcttcctgcccgctcaatttagaaaggaacaaggagtagcttgccaaaagaatcatatacagcgtcgaacctgtctcatccatgagccggcgcaaattctccgccgattccttttgaaggcgcgttcgaacaacggacccgctgaaatcaggaagctgcgggcgctttttatcgagcggcagatcaagtacgggaatgttttccccgatcgtctccagccaataacgctcatgtcttttgaattcttcagcggcaaaccgctcatgctgccagacggaaaaatctttgtactggagttttaacggctgcaactcctttcctctgtataaatccgtcaattcttgaatcagaacgctcattgacacaccgtctgcgataagatgatgcatatcaagcagcagaaaatgacgttcttcagtgactttggctaaagtcactctcaaaagcggcgctttttccacatcaaacggtttgacgaaagtttccatcacctcttgaagaaggttcccggatggcatgtgaatctctgtgaggtcaagatcgacatgtgaatgtatgtgctgcatcggctccccgtttcgtaaaacaaatgaagtgcgtaacgcttcatgcctttgtaacagcgctgaaaaggcttcgtgcagccgatcccggttgagtctgccgctcagttccagacaagcgggcatatgatagcctgtactgtccgctgcaagctgatgaagggcatagagccttttttgcgcaaaagatagcgggtacaagtcctttgccacagcaggcgtgatttctgcatattctcctcttttcctctgttcaaggaagcgggccatgctctcgatggtcggatgttcaaaaacatggcggacggcaagttcaatttggagccgtttatgtatgtttgaaacaagcgacgcggctttcagcgactgtccgccgatttggaagaaatcatctctcatactgatatgttcccgtttcagcacttcttgccaaatagacagcagctcggtctcaagcattgtgcgcggagcttgataatcaccggttctctcagcttctttcggctcaggaagtgcggcccgatcaagttttccgctcacagacagcggcatttccgtcaatttcgtaaagcttcccggtatcatataagcaggtaatctcccggccaattcggcatgagggtcaaatgtcacacccgcgttttgcagtacgacataagctgcaagctcctgttccccgtccgccgttttgcgcacggtgactgccgcctcttttaccccggacagacttctgagtgccgtttcgatttctcctaattcaattctgtaacctcttaccttgacctgatcgtcaaagcgtcccatatattcaatcgttccatccggtaaaaatcgggctgcatctcccgttctgtacagccgttcaccttcacgaaacggatgaggggtaaagactttgtccgtcagctctttttgctgaaaatatccgtccgccagaccttttccggaaatacacagttcaccgacggctccgaccggctgcagccgatctccgtgcatcatatagacagaagtgttggcaatcgggcgcccgatcgtaatccggctgcttttttgcaggttgcgcagaatcgtcgtggccacactgttttccgtcgggccgtattcattcagcagctcggcattcgggcatatgttgcggctcgcttccacgatatcaggggtggccgcttccccggcaaatgtcaccgcccgaagcgtctgcgcatcctttttcgtcagcgaatcaagcagaacgcgatacagagacggaacgatcagaagatggctcactccgtggcgggtgattttctgttttattgaaaggacgtctttcgcatcatcttcatcagttaacaatacacaggcgcccgacagaagcggagtgaaaagactcgttaatgacccgtcaaatacgtatgaaaaaagatgaagcgctatgtccccttctgtcatcccgtattcttcacgccgccattgcaatgtattgctgatcgctttgtgttgtacaagcacccctttcggccggcctgtcgttccggaggtgtaaatgacatacgcccaatttccgctgtcagagaccggcggaagcggtgcggtctgctgggaaaccgtttcctccatgatgacgacgctgcctttaaaatgcggcgggatgagggggagcaggtctttttcagtcacgagcagtgaggcttcactgtctctcagtaaaaatgaaatccgttcaggcggaaattccgcatcaatcggcatataggcgctgcccgacttccaaattccgagcagagcggcaaccgtactcattgatcggcgcagcataacagcggtgatctggtcggggcgtgcgcctttttcccttaacgcatgcgcaatctgattcgcccgctgatttaatttcttgtagctccagcataccccgttatatctcaacgcctcttggtcaggcgtttttgccgcctgttcttcaaacagcccatgaacggttgtctcagggtacggacggttcgtttcgttaaacgaatgaatcaaggcttcttcctccggaggcacgagactgatgcttgataaaagcctgtccggatcttccgttacacaggagatgacctccagaatatgccctttgatccgtttcatctcttcccgatcgtagatgcccgcattgtagctgaattttacataaaactcttctcccggaacgatgacgacgttaagatcgtaattggtttcctccgccatcgaaaagttttcaagtgagagcgcactgctttccgtttgctgccagccgtttaccgcagcctgcatctgaaccggataattctcaaaaaccaggatatggttcaagagatctttttgcagaccgctctcgttttgaatgtcataaagcggataatagctgtgctcttccgcagcgagtgactctttttgcacctttttgagaagagaagaaaaagtcatatccccagccgcgcgcacccttaccggcacggtattgataaacagtccagccatggattcaatgccgctgatagcagacggcctgccggaaacaaccgaaccgaagaccgcatcttcagtgccgttgtaacgatggagaagcaacccccaaatgcccgtaaataaagtattcagcgtgaccccggtgcttcgggcaatgtctgtcagtttttgtacggtttcaggctcaagggaaaattgaaaatgctcagatgcataaccgttttgcgccggcttatgcttcgtttgcggaacggaaacgacttctccgtaatcttccaagcagcgcgaccagaacgctgacgtttcttctttattccggcttcggagccatttgatataagagctgtacggagccggactgccgaggtttacaggccgcccgttccggatcgcataatacatgctgaagaaatctttcagcacaatgcccaagctccagccgtccatcataatgtgatggtgagtccaaacgcacgtatggcggttttctcccgtttgaaaaagagtcaggcgcattaaggggcctttttgcagatcaaaccccttatgccggtcggtttccttgaattcctcaatgatgctttgctgccgttcttccgaatagtctgaaatgttctcagtctgtacggctgtgtcacggcgtgaaaggacaacctgctgcggaccttcaaggtcaggcacttcttttatgaaaatcgttctgaaaatatcatagcggctgacaagcatatccagacttttttggaatgtatcaatgcataaatccccgctgactgtaaacgaaatctgctcgacatatgcgtttgatccggaatccagaagcgaatgaaacagcatgccttcctgcatatatgataaagggtaaatatcttgaatttctgtcgcttgtgtcacgaatgccacacacctttttatgaaattaaagtccttttacgagatcttcaatgctcgatagtgcttgagcggtcaattctgtatggctgtaatccgttaatgttttttcccgctcttttttgccggaacagtgggcgatgatgtcctcgaggtgagtatggaaacgattcatgaagaactcgattgcccccggtgcaaatacatcggtataaacggcttttacctccagttgcccggccgccaccatcgcgttaatatccagatcaaactcgcggatgcgcccggccgctatatcatgctgcggcttgaacggtgacatcttcagcgttccttcaagaccgtcaaacgcaccgagatagttaaagcttatttctgggtctttataaagaatgtttcgcgaatatctcagcagcccgtagccggttccgtggtgaggaacccgtcgcatcatgtcttttaccgtctttatgcggtgcgcggttgtttcgcctgagccgtccggcactctcatatccaaaagcaccgggtaaacagatgtaaaccagcctgccgttcttgacatatcaatgtcaggtatatgcccctggcgaccgtgcccctcagtgctgataagcatctgttcagaacccgtccactcatgaagcgccattccaagcgccgttaaaagcaattcatgaacatccgttccgtatgcctgctgtgtttccaacagcagctgtttcgtgacttcgctgcttaatatccacgatgcagtgcacgcgttttcctgcaatcgtccggcgttttcatcagttattttcggcagcggcgctgtttcactagacatcacgctgtcccagtatgcggcttcctccagcaatgctttgcttttggaaatgtcaaaaagttcttcggcatactttatataagaatcgcttttcggcggcagttcgatttgtttgccgtccaatgcctgctgataagctgtctgcagatcttcaagcaatatcctccatgacacgccgtccacgataaggtgatgaatcgttataagcagatggtcggcttccttctgcctgaacactccgagatgaagcagaggcccctgatcaagacgcatagcctgctgtatttctttttcctcagcggctatccgtttttcgggctgcgtttcttctgaaatatctatgacgttaagcgtaaagatttcttcatactgctttgtgattccgcgattatattgaaccgtttccccatgctcattttcagtgaaggtcattcgcagcgcatcatgatgttctgtcagcgcgcaaaccgcctgatacagcgcatctatttcgaggctgtcttcactgcacagcatgaccgcttggttataatgaagctcaaacgcacccggctcctcaaaaaatctctgctggatcggtgtcagcggagcgcttccttctatcggcccctgatcagccgttgcaacagccggcgtgaggtgctttgcgagttctgcaatcgttgggaattgaaacaaatcgcggatcgacatgttccagccttctccggcgagtcgggctgacacttgaagcgccttaatggaatctcccccaagctcaaagaaagagtgatgaattcccgctttctgaacatgaagcacatcttcccaaatccggcataacatctcctgtttttcatcgccgggcgcgacaaatgcctgtgatgaatgtatctcttctgccggcagtgccgatttatcaagtttgccgttcagtgtcaggggcatgctgtctaagccgataatatgagacggcatcatataagccgggagctcctgcataagagactggcgaagtgatgagatatcggcctctttaggaacgatgtatgccgctaatcgggcttgtccttcagcatctttcatcacggtaacagccgcttctttgacttgatcgtgtttcaaaagcacactttctatttctcccgtctcaattctgtatcctctgatcttcacctgcttatcgatccgccctttaaaacgaagagttccatccggaagccagcaagcctgatctccagttctgtaaagcgtttctcccgtttgtaacgggtcactgaatgcgccctttgtcagctcaggctgtccccaatatcctttggcgacgccggcgcccccgatatacagctctccgaaaacaccgatcggctggacctgtttgtctttgtttaagacgtacatttgcacattcggaagcggaacaccgatcggcacatcatcttcccgcggctcttcgctcattttagcttcataatacgaagaatcaattgtcgcttctgttacaccgtagctgttaatgatccgcatttcttttccgaagcgttcttgaagcgtataaaaatcctgcgacttgatcatatctgaacccagtacaagtatttttacactttgcagcgcgagcttccggcgatatatatattccataaacggaacaatcagcgcgggtgtcgactccataaacgtgatacggtgctgatcaatgagctgataaagctgttgtggctcaagccggacgtcatccggacaaatgacaagcgttcctccgtttagcagggcgcgtgcaagatcccctgaaaatacatcaaatgagaaactcgccatctgcagcactcggactggtttacgatcaagctcataaattttccgccatgcaagtgctgcatgcgtaaagctgagatttctgacttcgactcccttcggcgttcccgttgttcccgaagtatatatgatatatgcagtatcatccggagacgctgccggctgaatattctttgcacaaatatcgtattgatcttcatgatcgagctgaatgagaaataaattgtgatccgtcagctgtgaagcaagttctttgtattctgactgcaccatcaagacggatgccgcgctgtcttttaataaatagcgaatccgttcttcgggataatgggagtcaaccggtatatacgcccctcccgatttcatgacggcaagaacgctgacgatcgcttcaatcgaacggtttgccaatatagctgctctttttcccggaccgaatccatttttgtgtaatgttcgcgcaagccgatttgcccgctcgttaagctgcgaatagctgatctgttgtgttccttcaataacagcggtctgatgaggcgtttcttctgctttctcttcaaacaactggtgaaacagtttgtgtttttccatgaattcggtttgtgtgttattaaactcaatcagtaacttttgtttttcttcttcattcaaaatgtcagttttcgatagtgtgacttccggttcggcggcaacatggcgcaagagattcagtaagtggcccatccagcgttcaatcgtttctttcttaaaaagctcggtgctgaattccatttcaaagcggatgtttccatcggattcagccgctgataaggtcaggtcaaaacttgatacatcatgttcggtatgctctgatcgtgacgccttcagaccggccagatttatctcctctcgctccatattctgaagaataaacatcgcatcaaacagcggattgcggctcatgtcccgctgcacgccgagccgttccacaagctcctcaaacggatagtcctgatgctcatacgcctcaagcgccgcctggcggacttccgccaagtaatcggtaaaccgtttgtctcctttcggctccgttctgatggccagcgtgttgacgaacatgccgagaatcggttcaaggtctttgtgcggacgcccggcaatcggcgagccgacgatgatgtcttcctgcccgctcaatctcgcgagtaacgtattgtacgcggcgagaagcaccatatacaaagtggagccgtgatcccgggcgatgcggtgaaggccggatgccgtttcagcgtcaagcgtgcacgatacgctgccgcccgcaaagcttctgacagccggacggggcttgtcagccgggagctcaagcaccgggagc

SEQ ID NO: 54 - DNA, 119414 bp, Bacillus amyloliquefaciens
aacgcgtcgacgcgtttttagaaaaattgaacctgtttacgatcgcggaaagtttaggagcggttgaaagcttaatctccgtgccgtccagaatgacgcacgcttcgatcccgcgcgaccgccggcttgcgcttggcattaccgacgggctcgtgcggatctcagtcggtattgaggatactgaggatttaacggcggatgtgaaacaggcgcttgatttcacttttataaagaatggatagatttacattctctgtcggctgtcagcttgtattataatgttggtagactataaaactggcaggtgaccttatatggagaagaaaagactgaaatcactactagaagattttaagcattacgcatttattctgcttgcagtcagcaccttcatttatatcggcgcggttcttcccggacaagggctgactgcgggccagaaaatgctgatgtttgtaacggattgtgtatttttagcgggcgcttatttctgcgttgaccgttcacttatttataaaaagaggctggaagaggccgaagaataaaaaaaagccattgtcttttgacaatggctttttcgtttcttattcagacggggtttcgcgtaattcttttcccattccttttaaaaactgcagcccgaagccgagcgcgcggttaatatcaggatcaccgacggctttcatcagttcaaacatactgactttcctgtcctcttttaaaaatctttgcgcctgatccgtcccggccatggcgctttctaaaagtctgcccataaattcgggatcagcttttgacagcgcgcctcccgcggccatcatcgtattcaggagattggtgacaggttcccgggaaatctgttcgagtgcaattttggcaatctcctcttttgcctggagcatatagccggcggcatcaaaaatgcccaagctattcagctctgccatgatggacatcgttttcgcgacggcttcttcattttctgcgagaagcgtcttcagctcttccagtttttcagctttcagctgttcctctgttttcgtttctttttgaatttcagtaattgggcttgccataatgtttcctcctttccttaatcagttaagtgcacatagcccggacggttccattttcgctgagcttccacaccgttttgcggatgacgttttttgttccgcggattcgttttcggaagcggcggagtatcacaggaaccgagcacttccatgcggacttttgtctgcttataggcaggtgtatgtgtccgtgaatcatacgcaggcccggtcaggaaattaatcgcagaatctttatctgtagagttcatcggcagataaagctcatttgcgcggacacggtctgtcacaagcgcgttcaatttaaccgctccaaaaggagagacgagccggatcattgtcccgtcgcaaattccgcgttcagccgcgagctccggcgatacttcaacaaatacatccggaactttagactgaatgccttttgacttgtttgtcatgtttccttcgtggaaatgttcaagcatccgtccgttgttaatatgcaggtcatattcttcagggaatacagcaggctccacccaatcgctcagcgcaaaacgggcttttttgtccgggaagttaaagccgtcttcataaagaagcggagtgctttctcccgtaaagcttccccacaggaagctgttccaaccgctaaggacgtcgtagcttgcttttccgaacagcggagaaaggctcgccatttctgagaaaatgtcgctaggatgcgtgtaattccaatcagcgcctaaacgattggcgacttcctgaataatccaccagtcgggttttgcatcgccgagtgtcggaagcgcctgatacaatctttgcacacgccgctctgtgtttgtaaatgttccgtctttttcaagagatggaaccgcaggcaggatgacatccgcgtattgcgccgttcttgaaaggaaaatatcctgcacaacaaagaaatcaaggctggataaaatgtcatgaacatggttggcgtttgaatcgacgagcgccatatcttcaccgacaagatacatggctttcatgtttccttcttcaatcgcatggagcatttcgatattatcaagacccggcttgccgtcaatttcaacaccgtaagctttttcgaatttagcgcgtgccgcatcatcggtaatatgctgataccccggaagccagcctggaagagttcccatatcgcaagcgccttgaacgttgttatgtccccgcagcggataggctccggcgcccggacggcggtagtttcctgtggcaagcagcaggttggaaatcgccgctgatgtatcagagccgcctgtattctgggttacgcccatgccccaaagaacacaagtgccgtcagcatcacgaatcatttcggcaatacggatgatcgtatcctgagaaagtccggtgatgcgctccgcatattccaatgtgtatttttccagcgtttctttataatcatcaaagtagttgacattttcatcaataaacgcttgatcgtgccagccttggtcaatcatatatttcgttactgccatgagccagacctggtcagtcccttgtttcgggctgataaagaggtcggaccgttcagccatttcatttctgcgcagatcggcaacaatcagtttttggccgtgcagtttatgggcgcgtttcacgcgtgtggccagaaccggatgtccttccgccggattggcgccgacgatgagcacgaggcccgcttttgcgatatctttaattgtgccggcgtctccgcccataccgacggtgcggaataagccgtccgttgccggtgactggcagtagcgtgagcagttatccacgttgttggtttcaaatacttggcgcgctaatttttggatgacatagttgtcttcattcgtaattttagaagaagaaataaagccgacagaaccatttccgtgttcggccttgatcgaaccgagtcttgaagcgacaagatcaagagcttcttcccatgacgattcaacaaatgcgccgtttttccggataagcggttttgtaatccgttcttccgaattcacgaagtcccagccgaatttccctttcacacaagtggaaatcgcgttaaccggagcatcggaaacaggctgaattttaaggatgtcacggccttttgtccatacttcaaaagagcatccgacgccgcagaacgtgcagactgtttttgtttttttcgtccgtttatcgcgcatagccgcttccacttcagacacggcgaagatgcttgtatagtcgggttcaacattttttactaaatcaatcatcggttccatgacatcttcttttattcctgtcataaatccggcttggccgagcattgatttttccatcagtgcgttacaaggacagacagtgacacactggccgcagctgacgcaggaagattcattaatggcgacgccttcatcccaaatgacccgcgggcggtcgcgctcccaatcaattgaaagggtctcattcacctgaaggttttgacacacttccacacattggccgcaggcgatgcattggttcggatcatagcggtaaaacgggtgagacatatcaaccgcgcactttgaatcatctttcggcgtatacggatatttctgatgctcaattcccatcatttccgctgtattatgcagtgtgcagttgccgttgttgttatcgcataccgtacagtaaagcaggtgattctcgagcaggcggtccatggcctctgtctgagcctcttttacccttcccgacgtaagcgagatggacatcccgttttctgcagccgtggaacaagagcgctgcaatttcccgtttacttcaacaatacaggtgtcacatgtttgaatcggatccacttccggtacatggcatatttgcggaatctcaattccgttttggtttaaaatatctaaaatcttagacccctctggtgcttcatactccgtgccgtcaattttgacacggatagactgaacgtctgtcacttccaattcccctccatcttgtaaactcgaaaaaaagccatgcacatagataccggcctcctgtccggagaacggtataaatacgcatggcggaatagttcactagcaagtcttactaacagaccaatcctatttgtataaaacgatagactcataacacgtttcctattacaaatccatcttcactgcttttattataaggtgatatttattataatacaatacgaaaggaaaactttaaccaagtgaaatgtcacaaaggggaaccgggaatgtctttcataggctaaaatcggaggggacaatatgtctaaaaaaattcatgaatttaacgatattatccggaaattgcgcaaagaattatttggaaaggggcctgaacgaattcacaccgtttttgtggataacatggcggtatctacactttacggcaatctaagcgcaagtgagcagtttatcgcacgcacgcctgaaggaagagaaatggttcatgcggcgcgaaccagcttaattcaggagctgtattcaaaacaaacgcctgacggaatggaagagctcatcggagcaaagctggtgcatctgttttcagatattaaaatagaggaaaatattgccgtatcggtgtttgtctttgaccgctcaattgaagagcataaagaagaaatcaaaagctgacaatattcaattgacacgaaattgtcacatttgatatgatatgaactgccagcagtggcctaaggacgattttttatggaatgtgtgcatgatctgtacatattctataccgcatattttcattctgcttgatattgttgtatgggtatgcatacaagttaggcagcattcaaaccccgttttttcagacgggttagttgaatgctgccttttttgttaggtgtctttggaaactgcgggctgaaatgataaatggaggggttattatggcttttcgtaaaccggacgaaatagcggagcttgcggtcgaatcaggggtaaaaaaggtgcattcaccgctttcagcactgattgtattaggatttttgggaggagcgtttatcgcactcggttatttgcttgatatccgtgtcatcggcgaccttccgaaagaatggggaagcctgtcgagtttaatcggggcgtccgtgtttcctatcggattggtgctcgtcgttcttgccggcgcggagctgattacgggaaatatgatgtcggtatccatggcgctgttttccagaagaatatccgccggtgcattagtgaaaaattgggtgatcgtgacgttgatgaatcttgtcggcgcactgtttgtcgcttactttttcggacatgttgtcggattaaccgaaacaggaccgtatttggaaaaaacgattgcggtcgcacaaggcaaattggatatgccgtttggaaaagtcattgtttcggcgatcggctgtaactggcttgtctgtttggccgtctggctttctttcggcgcagaagacggagccggaaaaatcgcgggtatatggtttccgattatggcgtttgtcgcaattggttttcagcacgttgtagccaatatgtttatcatcccggctgcgatttttgcaggttctttttcgtggggtgatctgattggcaatctcattccggcttttattgggaatgtcatcggcggggcagtgtttgtcggtcttatttattttattgcatattcaaaaaaagatcagaaaaagcaagggatgaaaagagtttcctgaggtaataaagatgccggaaaacacggacaattgaagcggaatgccagcacattttccgtccaaatcttgaaaaaaatgtttacaaaatggaagctgatggatatacttacaaagtaagaaaaaagcaaagggaggttgaatcacatgacgacgttaaacggcaatcaaaatctacaattgaaccgattcagcctgtggaagagttcgtgtccttccttaacctctgcccgtcaagcacgttaatttcggagtatcaggacattcgcagctccccgcagggaaagaagcaccgtcttcttttgtctgcggatttagtctgcccgcagcgcatatgaactttgctgcgggttattttcgcttgtgcggatattgaaagggggtgagcgataatgaccattaatcttttctttttaacactgaccatttcaaagcgttttaaaagtgcggaagagtatgaacgagaacagcaggtcgaagagttttataatgaagcgaaagaacgccagctgaaacatttttatatgaactaacggacacgaagggccaaaacggaggagaaggaggagatcatcatgttcagaattgaactgctgaatcattacacaatggagaaggaccaggtttagcgaggatgttgctgtcacgtcgcagacggcctgcataccatggtaaagaaagaaaaattggtaagcgggtgataacatgcaaggcggtcagaacagaattccatccatcgggcacgggtatgcgtcaatgccccattcatttaaacacggctacggcaacccgtaccgccggcagagaatggcggcgctttcccggcagacaagatatatagcaccgtattattggtactagagcaggcggaaaacctacgttttccgtcttttttttatgaaaacaaatataaatttcaaataaatcgaaacgttcataaagagaagtgcgtctagttagtacctcatactaatacgaggtaatattatttctgaataataaatcacaggaatggaaaagcgggtgttatacaatgttgcaacatacatcttcagcattaaaacgaatgcgcgcgaaatactttgctgcatcagaaccggcagagtcagtcattcagcaaatcttgatggacatacaggaatacgaccgcattctggaaatcgggaccggaaacggctcaatgtttaaacaaatcatcggacagcttgaaaagggcagtcttaaaagcatagaaacatcgaaacgtaaaatacggaaaacacagcgcgcaaaccgttcggttataaaagccgggctcggaaacattcagcaggggaggccggaaagcataccgttccgcgaccgcagttttcataaagtcttctcattacatactgctgaaacagtcagcgattaccggacagcatgtaaagaagtgtaccgcgttcttcaaattgacgggtgtttctatatggttttgaaaccttcgcggatgagtgagaaggatgtgattgaggtgctctatgatcagcatttcagagacatttcagttgtcagcagagattcattccattttattactgccattaaatagaatatttcttgggaaataaaaagagctgcttaagtcactgcagctctttttgtgaaattgggcatatttccttatttttggttacttcacatatattttatattaaaaaaagtttttttcttatacaatggtaatcagatgaccgtacattttaaatattttgaacaaacggaatgaatattcattccgcatttagaaagggggatgaaatgacagcttcaaacaaggttgaactcattatgaaagcgtcgcttactttgtttacagatagaggatttgacgccacgacgattccgatgatcgccgctcaggccgatgtcggaaccggcacaatttaccgttactttgacagtaaagagacacttgtgaacgtactgtatcaggaaagtgcgcagcgttttatgaaaaaagtcaaaacggactttcaggggatatctgtaagagaagggtttcatcacctgttttattgtctgattgattttacgaaggaaagtgagtatgcattgttttttcttgaaacgaataaggacgcctactttctgaatgaaacgagccgtaagcttcttgatgaaataacacagatgcttgacgtcttttttcagcgcggcaagtctgaaggcgtgctccgcaatctgccgtccaatgtgctgatggcgctgctgctcggggcatatctcaaactctatcagcttatccggacgggaagcgtcgaaataactaaaccgtttctgaaagagttggaacaatgttcttgggatgccatcagaactcattaattatacgccgaaggaaggaagatcgatatgaaacagctaagcgctataccgcagccgaaaacatacgggcctctgaaaaatctccctcacttggaaaaagaaaaactgtcacaatcgctttggaaaattgccgaagaatacggcccgatctttcgttttgaatttccgagctctgtcggggtctttgtatcaggccgcgagctcgcggcagaagtctgtgatgaaaagcgatttgacaaaaatctcagcaaagccctgctgaaagtccgcgagtttggcggtgacggactatttacgagctggactcacgaaaagaactggcagaaagcgcatcggattttattgccgagcttcagccagaaggcgatgaaaggctatcattcaatgatgctggatattgccatgcagctcgtgcagaagtggagcagattaaatccgaatgaagaaattgacgttgccgaagatatgacgcgcctgacgctggatacaatcggcctgtgcggatttcattaccgctttaacagcttttaccgcgacacacagcatccttttatcacaagtatgcttcgtgccctgcaggaggcaatgcgccaatcgcagagacacagcctgcaggacaagctgatgatcaaaacgcgacatcagttccagcaggatattgaagagatgaattcgcttgtagaccggatcatcgctgagcggagggaaaatccggatgagaatctgtctgaccttttagcattgatgcttgaagcgaaagaccctgtaacgggggaaaggctggatgatgaaaatatccgttatcaaatcattacctttttgatcgctgggcatgaaaccacaagcgggctgctttcttttgcgatatactgcctgctgaaaaataaagataaattgaaaaaagccgttcaggaagccgagcgggtgctgacgggagagacccctgaatataagcagattcagcagctgacatatatccgcatggtgttaaacgagactttgcggctgtatccgactgccccggcattttctctgtacgcgaaggaagatacggttctcggcgggaaatatccgattgcgaagggacagccggtgacgattctgactccgcagctgcatcgggataaaagcgcgtggggagaagatgccgagttattccgtccggaaaggttcagtgatcccgcggccattccggctgatgcatataagccgttcggaaacggacagcgagcatgcatcgggatgcagtttgcccttcaggaagcgacaatggtgctcggccttgtcctgaaacactttgaactgattgatcataccgattatgagcttacgattaaagaagctctaaccattaagcccggtgattttaaaatccgtgtgaaaaacaaggacgtgtccaatcatcagcccgtacaaaaccataaagctgaaggaagcggtcacaaagaagaaacgaaagaaatcccgtcccacggaacgccgcttctcattctttacggatcaaatttaggaactgcggaaggaatcgcggaagagctggctgatatcggaagaagcaaaggattttcaactgaaaccggcccgctcgatgattatgccgggaaactgcctgtaaaaggcgcggtcgttattgttacggcttcttataacggggcgccgcctgataatgcggcgggttttgtgaaatggatggaaacccttgaagatcaggaattaaagggtgtttcttacgccgttttcggctgcggagaccgcaactgggccgccacttaccagaggatcccccgcctgatagacaaagtgcttgaagaaaaaggggcaaaacggctgacctctatcggggagggcgacaatgccgatgattttgagtacagtcaggaagcctgggaagactcattctggaaggacatcatgaaggcttttcatatagaggccgctccaaaacagacaaacaaatcacagttatcaatcgaatacgtaagtgaagcagccgagacgccgattgccaaaacgtacaaagcatttgaggcggaggtcatcacgaacaaagagcttcataccgaaagcagcaagcgctcagtccggcatattgagctgcgtctccccgaaacagaaacgtatcaggaaggagatcatctcggggtgcttccgcaaaacagcggggaactgatcagccgtgttattcgccgattcggtcttgatccgaaccagcactttaagatcaagggccggcagctgcctcatctgccgatggaccggccggttaatgcgccggagcttttggcgtcctatgtagagctgcaggagccggcaacgagagcccagcttcgcgaacttgccgcacataccgtgtgcccgccgcaccaaaaagaattggagcatctttattctgatgatacggcatataaagaaaacgtgctgaaaaaacgaatgaccatgctggacctgctggaagattatccggcttgtgaactgccgtttgagcgctttttagaacttctgccgtccttaaaggcgcgctattattcaatctcaagctcaccgaaggcagccagcggggagctcagtatcacggtcggcgttgtgacggctccggcatggagcggccgtggggaataccggggcgtggcttcgaactatttagccggattacagaatggcgattctgccgtctgtttcattcgctcgccgcagtcgggtttcgcattgcctgaaaatccgaaaacgcctctcattatggtcggagcaggcacaggaattgcgccgttcaggggatttatccaggcgcgcgctgccgaaaaaatgtccggtaacatcctgggcgaagctcatttatacttcggctgccggcatcctgaacaagacgatctgtacaaagatgaattcgaccatgcggagaaaaacggccttgtcaccgtgcaccgagcgtattccagattagatcaggactgtaaagtatatgtacaggatgttctgcttcgcgaggctgaacaaattattgctcttcttgaccaaggcggccatctctatatatgcggtgacggaagcaaaatggctccggccgtagaaaatgtactgcttcaggcgtatgaaaaggtgcataacactgattcaaaagtttccttggagtggcttgaacagctgcaggcggaaggaagatatgcgaaagatgtttgggcaggtatgtaacagaagagtgagacaactgaagaatgttttttaattgaagaaagccggcacgatatttgaaatctactgaatcaaaaggaatagttatagggagtatcgtgccggccttatctttagtatcggacaaaaggcacaaatctttaatgtttttattgatttacatgcaggcggctatgtcccttttttctgaattccgccagaaataaaaccggataagacagcaatagcaaaaccgaaataaatgaaatgataccgatccaatgaaaatgcgtccaaaagaaaccgccgcaagacccggccacacttgaaccgatatagtatgcaagcagatataatgaagaggcttgcgcgcgatgatcaccggctgcgcggccgacccaggcgcttgcgatcgaatgcgcgccgaaaaagccgaaggtaaagacggcaatccccgcgattttaagcgcaagctggggcaaaagtgtcaccgctgcgccggcaagcataacaaaaatcgcaatcttaatcattttcgcgcttccgaaaagatctgcttttttccccatatagaccgagctgaacgttcccgcgagatagacaataaaaataaaaccgatcacagtctgcgacaaatggtaaggagccgccattaaatgaaagccgatataattatataatgtcacaaaactccccattaatataaatcccagagatattaacaaaagcagccgtttgcggtgcagaaccgctccgtattccttacatgccgcttttacgcccgcatgccgctcagacgaatggcgcggagccggaagaaaacgccaaaacaaatagcttaatacaatagaaagaatgccgatgatggcaagcgcgggccgccagccgaatacatcggtcagaagccccgttaacagcctgccgctcattcccccgatgcttgtgccgctgatatacaggcccatcattttcccgagtccctgcggatcaaactcctcgcctacatatgtcatagcgacagccggaacgcctgccaggaaaataccgagcagacccctcatcgccaaaagcgccggaaaagccggactgaacgctgttaataaccctaaaacagaagtagctgttaacgacagcaccattaatttttttctgccgaatccgtcagacaacgaagcggcggccaataatgaaaatgccaaaacggctgttgagatggataaagttaagctggcagccgcagcggaaatatgaaactcttccgaaaacaaaggcataagcggctgtgtcgtgtaaagcgtggcgaatgtcacaaagccgctgataaacagagccaagctggcctttctgtaagcctttgtatgaggctgaataaacgtcatgaatgtccctcttttctcactgttggttatatatgtatcgtacgcttttcatttcaatgtgtctaatttataataactatagaattaatgcgtgtaggttatgagaaaggggagaaggagaaaatggagcttcatcaaattgacaacttcattgcggcggcagctcatcagcatttcacaaatgcggcaaaagaaagaatgatttctcagccggcattaagccgatcgattatcaggcttgaagaagaattaggcgcgctgttattttacagagagacaaaagccgtccggctgacaaggcacggagagcagttcttaataaaagcaaaacaagcgagacgagctctaaatgaaggcgttgaacaagtgaaaaagaatatgagcctggagcacggcgaaatatctgtatcatttcttcatacgctcgggctgcgcttaatgcctcagctgattgccgaatttaaaaagctatacccaaacgtgaccttccggctttatcaaggcgcaaatgaaacgcttcgcaaaatggtggaaacgggagatgcggatatctgtctcagctccccgccgcttcccagcgagcttttacaatggacagtgctggagaaagagcctctttatgcggtgctacctgagaaccacccgcttgcaggaaataaaagcattcaaatgaaagagatgcaggacgaggattttgtgggttttaaaccgggatacgggctgaggtatatgtttgatctgatgtgccgggatttgaatatacacccgcatctcgcatttgaaggagaggaagtgtcaaccatattaggactgaccgccgcgggtctgggggctgcagtgctgccgaaaaccgcggagcattcatactttccggtcgtttttcttccggtggcagattaccaatgcgaacgcaccatagcgttagcccagctgaaaaaccatgctctttctcccgctgctgagcgttttaaacagtttgcacttgagtattacaaagcacgcaactgagcggtcattttattaaaatcgaagttgaaaataaagcagaaagaaatacagaaaacggaggaaaaccatggcgaaaaaaacagtgaaaacaaatgctgtccgtatcattgagcagcaaaacattccctatgagctattaggttacaaaacagaaggtggacagcccgcagacggtctttccgtttcacaaaaaatcggatactctgccgaatatgtttataaaaccttagtggcatctgcaggaactgatcgttattacgtctttgtcgttcccgttgcaaaagaactgaatctgaaaaaggctgcgaaggcggcaggtgagaagaaaatagaaatgattgccatgaaggaccttttgggagtaaccggctatatgcgcggcggctgctctccgatcggaatgaaaaaaaggtttccgacttttattgatagatccgctgaaacactggagtttatgattgtcagtgcggggaaaatcggaatgcagctgaaagtagcgcctcaagatttagccgaagcaagcggggcggtatttacagacattgtataaatgtccgatgaatctaatggaatacacgtgtcaagggagaatgataatgaaaaaaagatatgaaaacttgaatggcgtgaagaatgaacatggattcagggacatgtggaaatggatgaaagaacgaagagagaaaagtaaagacttaagcgagaacattccgaaagcggtcactagggatgtccgtgatgttgccgtcaatcggacggaaaccgccataacatggatcggccattcttcatttctgatccaaatacaggggcttaacataatgaccgaccctgtatgggcgcggcggatgggttttcaaaaacggctgacagagccgggatatgaattgagcgaactgcctgacattgatgccgtgctcatttcacacgggcattatgatcatcttgattttccgagtataaaaaaactgagaggaaacccggatttttacgtgcctgcgggattgaaaaagctgttcaacaaaaaaggccgcaaaaacgttcatgaaatgaattggtgggatcgttttgagatgcggggggtcaatatatcatttgttccggcccagcattggacacggagaacgctttgggataccgatacctctcattggggaggctgggtcatagaaagcgaaaacggcgagtccatctattttgcaggagatacaggctattttgaaggctttaaagaaatcggagagaggtttcgtattaaggcggccctgttgccgatcggggcatacgaaccggaatggtttatgcaagtgtcacatatcaatccggaagacgccgtgaaagcgtttttggagctgaaggctgacagcttcattcccatgcattacggggcattccggcttgctgatgatacaggaccggaagcattaagcagactgcacggcgagtgggaccggcttgcattacctcctgaaaacctgaaatcattagcgattggcgaaacattttggctgtaacagcaggttttcgctgccgacaccaatcgtttaaaaacggttggtgttttgctgtcaatcaaaggtgaacagcctctgtataaaacatgatttttccggaacctgcggtaaaaaacaaaactttttactcttttgtttcactataaaatgaaagcggtttcgtatgcgcagtatatttaacctatcacaattgctccagcagaaacggacaggaaggatagaaaaacagatgaaatacatgaattcaaggcagaaaaagattttgtatctgttgttatctgaacctgatgactacttagttgtgcaagatttcgcagacagggtccgctgttctgaaaaaacgatcaggaatgatttgaaaacgattgaagatttcctgaatgaacatgctcaagctcagctgatccgcaaaccgggattaggcgtctatttacatatatctgaacaggaaaggtcacggttaagccggcaaatttataatgagcactttacatgcaggcacaagaccgatgaagaaagaatacttcacatcgcttatgatttattaatgaattcaaagcccgtttccgcaaaagaaattgccgcacagcattttgtaaacagagcttccattaaaaaggatgtaagtgcggttgaagagtggctgaagcgatttgatctcacgctggtttctaaacagcggctcggcttaaagattgaaggagacgaaaaaaacaaaagaaaagcattggcgcgaatttcagatttgattgataatgcggaatttacaagccaatttataaaaagtaagtttttaagtcatgaagcggactttgtgagaaaagaaatcaagttattacaaaaaaaccattctatctattttacggatgaaacatttgaaagtttgctgctgcatacattgctgacgatccgccgtatcaaaatgaaacagccggtcgccatttctgcaagacagctggacgcggtaaaaaagaagaaagaatatgaatggacactggcttgtttaaaacggcttgagccggtatttgccatacggtttcctgaggaagaagccgtctatttaactttacatataataggcgggaaagtccgctatccatcgcagcaagaaaagaagcttgatcttgaagattctgagctttccaaagtcgtcaggcatttgatcaatcgtgtttcagaactgcaaaagctggattttcataaagaccaggaactgatcaatggattgaacattcatctcgatccggtgttgaagcggctgagctatgatctctctgtttcaaaccccatgcttcacgacatcaaaaaaatgtacccttatttgtttcatcttatcattgacgttttagaagacatcaatcaaacatttgatctctgtattcctgaagaagaggcggcatatttgacgctgcattttcaggcagcgatcgaacggctgcgccgaagcagtcataaccctaaaagaacgatcatcgtctgccatatgggcattggcatgtcgcaattgctgcggactaaaattgaacgcaaatttcatcacattacggtaaaagactgtatcgcaaaagcggagctgacagagtatatcaaaaagcataaagatatagatttcgtcatttctacgatagggcttggaaatgtaacgatccctcatattgtcgtatcaccgcttttggagtctgctgatgaaaagaagctcagcgcatttatgcaacagcttgatacatcacaccgccgggagcaaaaaacgtttaaaatgctgaacgacacgactccgtttctcgtttttttacagcaagagacagagcaccgttatcaggtcattgaaaagctggcgcaggctttgtatgaaaaaggctatgtagaaaaagagtatggcattcatgcagtaatgagagaaaaaatgtcggcgacaaatatcggggcgggtattgctatccctcacgcgaactctaaatatatcaaacaatcagccattgcaatcgccaccttaaaagagccgattgagtgggggacggaaaaggtgtcgctcgtttttatgcttgccgtcaaacatgaagatcaaaacaaggtaaagcaattattcagtgagctttcctatcttagcgagcagccggcatttattcaaaaactgacggaagaaaaaaatgtaatgacgtttttatcgtatttaaactattaaaagcagggaatggctccctgctttttttctgtttatagggaaaaatgccgttatttccggaacttatggtaaaaaaacgcgcttatcacaggctgatttcagtataaagttgagacaagatcttgaaattcagactgcaaaggaggatttatatgaaactgttagcgattacatcatgtccgaacggcattgcccatacgtatatggctgctgaaaatttacaaaaagcagccggcagattaggcgttgagatcaaagtggaaacccagggcggaatcggggtggaaaataggctgaccgaagaggaaatccgggaagcagacgcaatcattatcgcggcggaccgttcggtgaacaaagaccgattcgcgggaaaaaagctgttggccgtcggggttcaggaaggcatccgcaaaccggaagaattaattcaaaaagcgcttagcggtgaagtgccggtctatcaatctgcttcaaaagctgaatccgcaagtcagcagggcaaaaaacaaaacccgatttaccgtcatttaatgaacggcgtttcttttatggttcctttcattgtcgtcggcggattattgatagcggttgcattgacgcttggaggagaaaaaacaccaaagggcttagtcattccggacgagtctttttggaaaacgattgaacagatcggcagtgcttctttttcattcatgatcccgattttagccgggtacatcgcgttcagcatcgctgataagccgggtcttgtccccggaatgatcggcggatatattgcggcatccggcagcttttacgacggtgcaagcggcgcaggattccttggaggaatcattgcgggatttttggcgggatatgcggcgcttggaatcaaaaaatgtaaagttcctaaagcaatacagccgattatgccgatcattattattccggtgtttgcctcactgatcgtcggtttggcgtttgtatttctgatcggcgcccccgtcgctcatattttcgcatcattaacggtgtggcttgcgggaatgaaaggttcgagctcaattcttctggcattgattttaggagcgatgatctcctttgatatgggaggacccgtaaacaaggtggcctttcttttcggatcggcaatgatcggagaaggaaattatgaaattatgggcccgattgccgtttccatttgtataccgccgatagggcttgggattgcgacgtttttaggaaaaagaaaattcgccgccgcagaaagagaaatgggaaaagcatcatttacgatgggccttttcggtatcacggaaggagccattccatttgcggcccaagacccccttcgagtgatcccgagtattatggcgggttctatgaccggctcggtgatagcgatgatcggacatgtgggggacagagtggcacacggcggccccatcgttgctgtacttggagcagtagatcatgtactgatgttttttatcgctgtaacagcaggctctcttgtcaccgctctgttggttaatgtactgaagaaagatatggcgaaatcccccgcgcccggcgaggtgctgccgtctgccgaaccaaatgaagctgcagcggcaaaagaaacaaaggaaccatctcaggctgacagccgaaaagccgggatgaccgaaatcaaaaaactgactgacattatcagtacagacttgattgaaccgcatttatccggcgaaacgagggatgacattatcgatgaaatgatcgagaaaatgtcccgtaaaggtatgctgctgtctgacagcggatttaagcaggccattttgagccgggaacagcagggaaccacggcgataggtatgaatatcgccattccgcacggaaagtctgaagccgtcaaaacgccgggtgtcgcattcggaataagacgttcgggtgttgactggaacagccttgatggttctgatgcaaaactgatttttatgattgccgtaccgaaggaaagcggcggaaatcagcatctgaaaatattgcagatgttatcccgaaaactgatggatgacagctatcgggaaaggctgctcgccgtgcagacaaaagaagaggcgtatgagcttctggaagaaatcgaataaagcgggggatgatcatgtctactgaaccgatatttttcaatccggttttcaaagaaagaatttggggaggcgccgccctgcgtaattttcactataatattccgtccgagcggacaggggagtgctgggccttcgccgctcatcaaaatggacagagcacagttcgaaacggcatgtataaaggatgtacgctcggtgaattgtgggagcatcacagagatttattcggaaaccttgaaggaagccgttttcctcttcttacaaaaattttggacgcggaccaagacctttccgtccaggtgcatccgaatgatgactttgccaaaatgcatgaaaacggggaacttggaaaaaccgaatgctggtatatcattgattgtgcaaaagaggcggagatcattttcggccacaacgcaacaacaaaagaagaactgatatccatgattgagcgcggagaatgggacgggctcctgaacagagttaaggtaaagccgggagatttcttctatgttccaagcggcaccgttcacgcgattggaaagggcacacttattttagagacgcagcaaaattcagatacgacttacagattgtatgattacggaagaaaagatgcggacggcaggatgcgcgagctccatctggaaaaaggtatagacgtgatagacgttccatctgtccgtgaacggccgaccattcactataaacaaacagatgatctgctggcagctgttttaatagaatgtccttatttttcagtcgaaaagtgggttgtgaaaggtgaagcaaatctattccagcatcatcctttccttcttgtcagcgtgatcgaaggagatggaataatgattgcaggcgggcatgaatatccatttagaaaaggagatcatattctcctgccttccggtttgggagaatataaactggcaggccatgcaaattgtattgtgtctcatctgtgatcctcaaaacccttctcttgcatcagagaagggtttctcatcacttttgcaaaaataccgaaatttccagcgtatcagtgttttcgttcctgaatttattctctcaatttgtatatctcccgagccatcgattcaagtatgtacatagcggggatttgggtggtgacattcgcattttcaacccattcttccgtcacgtaatatgaaatattcacatcggacattttggcaatggttgaatgtttatgatttgtaatactgatgacccggctgccttcttgtttcagctgattcagatgagtcaccgtagaatctccttcacctgaaaccgataatgcgatcgtgatgctgttatgacggaaatgggaatgggccggaaagtaaggatctttaatatacattgaaagttttcctaagcacgaaaaatatctggctccgtattcggcgagaattcctgaacttcccactccgataaaaatgacgctttctgcatcggccgcaagggctgctgcttccttcagcttttcttccatccctccgcttactgttctttcaaaaaactcggcaacggaatgatggggactctttaaaatcgtttttttatttgcctccgtatacattttcagcttcaccttaaactccgaaaacccttcacagtttatttttttgcagaaacgtaaaatagaagccgtagatacatgggtttcatttgccaattcacggattcgcatatagacgactttctcgctgttttgggagatgtagttgtataaagaagtttcaagctcgttaaatgaagcaatcatttcgtgtgtgaacatgcagggggattctcctttttatgagaatggtgaatgtacatctaatcgtaacatatcatttttaaaagaaacatagtgttatatttatgtgacaaatcactttttgtgtcattcaaaacaagacgtcagccaatgatttacggcgcaaaacaactgcggatataattcgttcatacgctttatgcatgatctctttaagggtctctgacaaaagcggccgaaaaaaggaggacaatatgagtatcaaactgatagcggttgatatggacggaacgtttttggatgatgaaatggcatacaacaaagagcgttttatgaatcagtatcgtgaattaaaagcgcggggaattaaatttgccgtagcaagcggaaaccagtatgcgcagcttacatccttttttccagagatcgaaagtgaaatcgctttcgtttccgagaatggcgctttcgtcgtgaatgccggagaagaattattcgcgggtaacatgtctgaagacactataaaagcagtgatccgtgctttagagcagtatgaggtgaaaaacgtcattgtctgcggaaaaaaaagcgcgtatattcatgaaaatgccagtgaagatgaatatctgcatgccagtaagtattattatgtgttaaaaagggtgccgcattttgaaaacatcgatgatgacattttgaaattttccatcagctttcccgccgaacattgttccgcacttctgaggcatttaaaagacgccatcgggtctttcgtcacgcctgtatcaagcgggcacggtgacatagatctgatcataccggggcttcataaagcaagcgggattaagcttctccagaaacaatgggggataaatgatgaagaatgcgcggccttcggagacagcggcaatgatttggagatggtgtctgccgtgaaatacggagtcgctatggataatgcgcaggaaagcattaaacaggctgccacgcatatcacgcaatcaaacaatgaagaaggggtcttaaatgcgattgattccattctcaaatgtgaaaaaccctttgtctgaaaaagacgttttaactgcggaggtgctgaacgatgattaaattagtgattacggatttagacggcacatttttaaataatcaaggcgattttgacagaacgttatttgaaaagacaaaacgagtaatggaggaacagcatgtcgctttcgccatctgcaccgggaagcagtgtgaaagggtggaagctttattcggagaagatgcgaaagatttttggattttaggagacagtgccacacgtataaaaaagaacggcaaattcgtatatgaatctttgatcagcaatgaagcgggactgtcaattataggcgctttagaaaaaatcagctgcgggcatagcattatcgcatgcacaaaaaatggcgcgatcgtaaaagaaaatctgtctgaaagtgagatgaaatatgtaaatgcctcttatgcacatgtaacgagaataactgattttactgagataaaagacgattttatcaagattacggttcatgatcccgacgccaactgtccggaaacgagagaaaagctgcatgaattttttcaccaattatatatcgtagcatcagaggatacctggatggacatatcaaatatcggaatacataaaggaacaacagtacaagaactgcagcgattattaggggtttcggctgatgaaacaatggcgttcggtgacggccgcaatgacaaagaattgatggaagcggcatcctacagctttgcggttaagaatgccattgacgaaataaaagatgcggcgcactttgtcatcaaatcaaatgaggaaagcagcgtcatgcacacgattatgagaatattagcgctgcaaaaacaatgatgggctaaagccaatgcggcaggacttactagggaaagaaaaagcgggctatcctcagactttaattcactcttgatttccctaaaatatgttaaaaatgaataaatatctatatttgactcgattgtattggtataatatgtataaaatgaatgaaacggcataatatcaagatgaaaaaaatcatttcatatcagacaaaaagcaggaacttcctcgtttttaaataaattgggaggtgtttgtattagcccgctgttgagtcccgcgtatatcattcttatttttcttccggcagcttcttttctgttagggatattagggtatttcatctttaaaaaagtatggatgatggttgttattgtcttcattttgtccttgatatttatgtttattgtaataggtgccgaaccgacatttttcatttgggtggctatgatgacggggagctgttttgtctccggttcaatcactaagacgatatggacttttgcaaagcgaaaatattagacagaagaatcctgtttgaacagctatcttttttttgtcgattgaagaaaaagaaggatagagttatccgttatgttcttatattttgtctgttgttgtcagatcgggctttctgttaaaaatgtctgtctatcgttttgttcttttttaactaagcggagcactataattgaactgtagatacatagaaaaacaaaaaaggataaggaggatttttatgtttcaaaccttagaccattttttgaaatcttgggagttcgaagccgatgcgacacagaaactgctgaatcatctgactgatgaatcacttaaacaagaaatcacttcacaacattggactttaggccgtattgcatggcatactgtcgcggccattcacatcattacctcaaacacagatttaacgtttcacgctccggctgaagattatcctgttcctgcatcggcgcggtttattgctgagagttatcatcaagccagtaatgcatttgtacaggcgttaaaaacgcaatggactgacgatacacttcaagaatgtgtcaactttattggtcagcaattgccgaatggttcacttttgatgtttttaattcaacatcaaaaccatcatcgaggacaaatgactgtccttatgagacaagcaggtttacctgttccgggtatttatggtccggcaaaagaggaatggacaacattcggtttggaagctccgaaataggatgttgatgtaagggctcgaatgaatagatgataccaatcgatgttggtatcttttttgttttttagagttattaaaccggtatccatgacatgcagacgaatcaacagttcaaaagatgtaaattaaggtcaataaatgcagaaaggtgattatgatgataactaaaatgactcgattcaatatgaaagacttcaataaaccaaacgaacctttcgttgtttcagggagaataatcccttcatttgaggacaatgtttggacatatacagaggagaaatttgctgaaccttatgtcaaaaaatatgacgatgaagacattgatgtcagttatattgaagaagaggataaagctgtctttttttattacgcagagaacgactgtgtcggccggagtaagcttcgttctaattggaatggatacgcactgattgaagacattgccgttgcaaaagattatagaaaaaatggtgtcgggacggctttattacataaagcgattgagtgggcaaaggagaatcatttatgcggtcttatgcttgaaacacaagatattaatgtttcagcttgtcatttttatgccaaaaataactttgtcataggagcggtcgatacaatgctttattccaatttttcaacagcaaatgaaattgcggttttttggtactgtaaattttaaagataacagtatttgatgtttcgtcatttagcgagtgtgtgtcgcaaagtattcaaaacatcggcttgaggatttataataaggtatatcaaccaatgcagggggagttaagtatgaagtgcaaaaaaatgaacagggtacaattaaaagagggaagcgtatcaatggccctataaactgcgtctgccctcattaatggaggggaaattgtgaatacgccttattcacaatcaactttacggcacaaccaagtgttcatttggctttgtgttctgtcatttttcagcgtattaaatgaaatggttttgaacgtctcgttacctgatatcgccaacgactttcataaactgccagcgagtgcaaactgggtgaacacggcctttatgctcaccttttccatcggaactgctctgtatgggaagttatcggatcaactgggcatcaaaaagctgctcctgtttgggattatggtcaatggcttcggatcaatcattggatttgtcggacactctttctttcctttactcattctggcccgatttattcaaggggctggtgctgccgcattcccggcacttgtaatggttgcagtcgtacgctatattccgaaagaaaacaggggtaaagcatttggtctgatcgggtctctggtggcaatgggggaaggtgtcggaccagctattggcggaatgatcgctcattatattcactggtcatatttgctgcttattccaacagcaacagttatcaccgttccattcctgataaaactgcttgaaaaggaagaaagaatcagcggacgctttgatatggcggggattatattaatgtctgcaggcatcgtattttttctgctgtttacaacgtcatatagaatgtcttttctgaccatcagtattctagctttcctgatatttgtgaaacatattaggaaaactcaagatccctttgttgaccctgcactggggaaaaatgtcctgtttatgatgggcgtcttttgcggaggcctgatattcggcactgctgcaggatttgtgtctatggttccttatatgatgaaagatgttcaccatttaagtactgcggcaattggaagcgggattatgttccccgggacgatgagcgtcatcatcttcggttacattggaggattgcttgttgatcggaaaggttctttatatgtgctcaccatcgggattgtattgatgtcttccagctttttaatcgctgccttttttatagatgcgacaccttggctcatgaccgttataattgtttttgtttttggggggctctccttcacaaaaacggttatatctacaattgtgtctggcagtttgaaacaaaaggaagccggcgccggaatgagtctgcttaattttacgagctttttatcagagggaacgggtatttcgattgcaggcggtttattatcgatccgcttgctggatcaaaggctgctgcctgttaacgctgatcattccgcttatttgtacagtaatatgctcattctttttgcaggaatcgttgttatgagctggctggtaaccgtgaatgtctataaacgttcgcaaagaaatgactaaaaagggaaaaggatcaaacttgatagaagttttgatcctttttttgaggagcttccttattccgaaaccttttggcgatcaatgaaaagggagttaaagtgaattacatttataagaaaaaggaaaagaaaaatggaaattgtatcatttcaatcagagataaatgggagaatgcacttattgagtttgaacaaaaaaataatcaaattgagatcatgatcaattatcgtaacgagaaaacaaccaagttttcactgccaatcgagacttttgagaaagtgtaagaggatattaaaataacccggagagaaagttaattattctgtttgaaaatgaccatgaagttcgtaagcagtatggttttaacacgcatttggattcccttggcaaagtaaaggtttttggggatttatattaaaataatagtaagaaccttgtgcagcggacagggagtttcgttgctttataaggagagggaactatgaaaaaaaatattcacatactgggagcctccggagtcggaacttcaacattgggtgttgcattatcaaagcatttgcctcatacgcatcttgatactgatgattactattggacagataaattcactaagaaaagagaaattcctgaaagaagaaagctgcttgaaaaagactttacaataaatgagaaatggattctttctggcgcagtgtgcggctggggcgatgatctaaaaagttattttgaccttgtcatcttcttatggattccgcaagatatacggcttgagagattaaggcagagggaatttcagcgttatggaaacgaagtgttagccggcggcagtaaatatgaacaatcaaaaacatttttagagtgggcttctttatatgataatgccggaatggaagttagaagcaaagctttacacgaacattggatggcagatttatcttgtccgttgttaaaaattgaaggagattactcagtaaatgaaagagttgaccgtgtcttggattatctgaattcaaactaacggatggagataactgcaaaatccaaaattcaaaggcagttccggccattttaacggagctgtttttttataccgctttcagtttctctgttgtgaagtgatttattttcggcagcatcccacaatagagaagtgatttgttcttcgttaagttctccgttggagtatttctctaaaattcgtataaatcgttcatcacttaattaattatttctttgtttatttttattctccatttcattttcagaccgaattaaagccctctcataacgagaagggctttccgcctttaatactttctcctcaaaaagaaggggaaggctttatccgtttatccctcgtatcgtttattaatcaactctgtaaacatagggaattattggttaacttagaattttttcgatccaaacaaatatctttaaaaaagttaccggcaactttctgcggcatatcgcagtgttcaattgtttagtccttttttttcataatctttacaaatctgaaaaagtcatcatcatccggcaggggcttgtcatcttcgcgtccattgcgatgcatatgcggatcagagtgatgttcattgtagaactctacgatatggaatccgcacttattcacatagaagttgatatttcgcttttcaaaataaggtgtcacggtttcccaaagcacagtatccggatactgtgcttctatggctttccaagcagaaagaccaatcccctggctgtgatgttctggagatacatagaataaatctagcgaattatgatgtgtttcgctgttgatacgtactactgcaccacctaccttctcaccatcccgaaaaatatgatatacgactgctccgggagcgtcgaaagactcctgaacatcattgtccgatggaatcggtccatcttcgcaatcaccgaacgtttcaatcacggcgatcgcaaaggcttcttgtaattttttttggaattctggcagatcagattcctttgctggttccagaataacttttggttccttttttgttttcatgattgctcactccttcagttgctgaaataacgagttcagtcgttcagtaaaacattccacctgctctgccgctttttcttccgcggtaaatttggcgttaaaatacttcaaaagctttctcctgtctttttgtatgatgtctttttctttgttttcttggaaaataagctgcatgtaacccttatttactatcgttcactgccgtattaagtgtggtacgcgggatttgcaatcattctcaaactttacctgcgaaaagttgcaaaaatagtcgaatgtggcgcctttgcctatgaacatgcgtaaaagattcaaattcgatcatgagcaatgcacattgagtaaactccggtgaatttattagcccaaagaagcctaatagatataaaaataactagtatatatatcaaatctgtccgtttaatgcccacttctcaacaactaatttgaagtcatgcaatctgtgcaaaggggttatttcggaattgatttttccgaatgcagcggagtcgctttgggacttccgtttactttgccgtacgtcagcttgcgccatatcaattccatcggaccgtacttaaatcgtttcaaccacaatgtactaaagctcataagcacgaagtacacggccagactgaacatgaacgtgccggcggattgaatatgatccgcaagcccgaatccgtacctgaggaacaaaactgttccaatgatagagtgaagcagataacaggtcaatgacatccgtccgactttggtgaagatcatcatagggcctcgcagctgaggaacgtacagaaacagcattgcaaaagtgctcatataaaacatacttccggttaagccgccattttgacccatgacagaggaaatgtccttccacagcatattctcagaaagattaaacatgtctagtaatatactgctttgtgttattagaaaagcgattgtgctgatgatccagatacgcttccatatgaacttttttgcttccatgtctttgaaaaattccatcttaacaaagtacacgcccagcagaaacatgagaaacatggaatagatcatagagaaagagccagccgccatcgtgaccatatctgtccaccgagtgctgatggattccatgtaggtaaggcttgtgtggctaaacaaagtaaactctgaaaaattcgggttttttgaccctgcagtattgatgacattgtacaacattgtgaaaacaggagtcaggaattgaaacacgataagtgcgataatccatctaagcaccgttttggccgtgcgttgatagaaggcgagtaacaggaagccgcttacggcgtaaaaggtcaatatgtcaccgacccaaacaaatgtgatgtgcaaaatgccaaatcccaacaggatagataacctacgggcaaacagcttgttgggactatctaccttctgcgcggctcgatccataaagatcataaacccaactccgaacaagaaggagaataatgtaacgaatttcccttcggcaaaccaggaaaccagattgtgcaggaggtcaccggaggccatttcgaatccctttactgaatctacgatcagaaaatagttgacaataataatgccaagcaaggcaaacccacgtacgatgtccagaaaatgaacccgttcccgcagactcactggttgcccgcgttcttctttttgtacaatcatatcaatactcctttcccatttaccattgcaatatgcagtgcggatctgaaaaactcgagccttacaatggataaatataaagacagaatcttaacaatttatgaaggttcatcattttttttaaaatgtgacaaaattgtggcggacatcagctttcataaactgttaagatttacgtagtatcttataacgtacgtgttacttatgaatgatatatagtaaggtcacacgagaaataacatcaagaatcatgaggtgaaagaggcatgacccatcgaatattagtcgtagaggatgatcatgatattggtgatcttttggaggaatcccttatgcgagcaggctacgaggtgctaagagccaaggatggaaagcgagcattgcaacttgtgaatgactcacttgatttggttattttggatattatgatgccaggcatttcgggaatcgaaacctgtcagcacatcagggaaacctctaacgtcccaattctgtttctgacggccagatcgagtacactcgataaaactgagggattactcgccggcggcgatgattatatgactaaacccttctcggaagaggaacttcacgctagagtgattgcccaattacgcagatatacaatctatcaggaaaagaaggaacaggaagaaacatttcttatcgggggcaaactgagagtgagcgaagaatttaatgaggtctggaaagaggagcagcaaatcaagctgtcagatctggaatatcgtatcctgaaactgctgatgagcaaacgcaacaaaatattttctgctcaaaatatatatgagagtgtgtggggacagccttacttttactgttctaacaatacagtgatggtgcatattcggaaactgcgctccaaaattgaggatgatccggcacgtccggtttatataaaaactgaatggggaagaggatatcgatttggcacatcgtaaattcacgctaaccaaaaaactggctttgctgatcatggttgctgcgattgtgagcggtgtgatctttctgacgctgcaaaagattacagatgatctgatcgagggatatctgagttcggatgagtattatcacaaggagtcagcgagatacattcaaaaattcagtcagtacgtttcagaaaatgggttgtctacatcggatagaaaagcgtttggcgagtgggtcaaaaaagaaaattacattaacctcaccatattcaaggatcaggagttgcaatatgattccgtttattccgaatccgattatggaaaagaaaagctgactcagtatgctcaaaatcattcacatcctgtcaagttcagcgatggtgaaggacgagtcattatcgacggtttctactcatcccgatattatgatctggcctttacattggatttgctcggtgcaaccctcatctttttaatcattgttctcttgggcattcgccaaagtcttcgctaccttaaaacgcttcaccaagagattcatattcttgaagggggccagctggactacgagatgacgataaaagggcatgatgaattagcgatgattgcaaagagcattgaggatctgcggaaagctttcttggacaaacttaaagcgatcgaggaattgcaagcagagagccgcagcctggttaccgaaatgtcgcacgatatgcgcacaccgctgacgtcgctgatcatgaatctggagtttgccaaaaaagaaggaggcaaagcgggtgccagcaaagatcgttatgtagccaatgcttatggtaaagcactgcaattaaaaaacttgtctgacaatctgtttgcgtatttcctgctgaataaggaacatggggccgacctggagaccgttgcagtgaaagaagtgatctacgatctaatatcagatcagattgctatccttcatcaggagcatttccgggtccatatttcaggcgagctgccggaaacctatattaacgtgaatttggaggagcttggtcgtgtatttgataatgtgatgtcaaacttatttaaatacgcagatccggaagaagaaatcagcatcacgtttgtatcggatcaagaaatatttgagattcatatcagcaatacgattaaacttgcggatgtaacgccggaaagcaacggactcggtgaaagaagcattgcgcgaatgatgtcccgcatgcaggggcagtttcacagtatacaaaagaattccaagtactgcatcgtgctgcgattttggaacagaaagatgtaggctgcgaatcaaaacgacgaaaatattgaaataggagacaacaagatgagattttccaacaattttaaaaaggcgccttacctgttacaagcgcttctcaatgtctgtctgttcttcctggcgatagccttaagcggacttctgatcagcgagacatggtacattgttcaattcgtatacaagtcactgttcaacaaagtggacagctattatgagatgcttggggaactgcttatattcttcatgtattttgagttcattgctttgattatcaaatacttcaaatcagactttcatttcccgcttcgctactttatttatattggcatcacggctgtcattcgtttgataatcatcgatcatgatcaggcgatctcaacgttctggtgggcgatggccattcttgcaatgatttgtgcattctttattgtcaatagacgaaattctgttgttgaacattaataattagttcactttataccgatacgccactgaaatgtcctatgacttacttgaatactgaataggtgtaaagtggttattcatacggattgaaaaagaagaacacgcagcagattcacttgctcttgtttggggcaagtgttgacaactctattactggtttaattaaagaaggagtataaaacctgtatcaatggtgttactagatatctgcgacacaggttttatatgtaggtaactaatattcttatatatgtaacattgcattttttattatgcaatagttcactctatttctgctttcaatttctcgaaccactctaaattaaccaagtgatgtgaacgggaattttcgttcatacggcgaaagtaattgattgtgccgggaatttcttgagtggtggacaggtattcatcaaggagctcgattcgagttttagtctgatcgatttgtgattggatcagatccagtaatttacttttgtcgaattcatcagcaaagagtaacgccccataaaattgaaggttcacatattccgatttggtgccgtatttgatcattaatttttcaaattctgcccttcccgaatctgtgacgttaaagttacggatttcacgcccgctggttgagggtttctgctgaatctgttcaatcaaacacttttcttcaagttgctgcagattgtaataaaatgaacctttcgtgaagttaacaatgtatttgtaatgacgtttttccattaaggccagaatttcatagccgtgagctccggggttttggatgagcaagccaaggataagtaagggaatcacggtttcatcaccttcgccatccgcgcctcaaattccgcgtacgtgattttacccgaagccaaatccatactatgaaggtaaatctgttctgttttagaatagtcaccattcactttcagtgattgctcctctcccgaaatgggtttcaggatatggtgctttttcgaaaaagcctcgaaatagcggtaaccgaatttgcgttgtgaaactgcgtctaaatgaatgccatcaggattcgcagtcaaacctgccgcagtaacaaaataacaattctgttgttcattagcaaaacgcagcaattgttcattaacttgtcgaaattcagtcgcgtgctgtccaaaaccagtcttctcaagaaagtcaccaagccctccaataatcaacggtacctcatcaagtttcaactcgtttcttagcgtctcgatgataagagttaatttctcgtaataagtttcatgcagcgaacgataactgtcactctcaccttggtgccaaaggattccgcaaatttgactggattggagggcgaagcgggcttcggacaaagcatgctgaaaaaggatgccttccggatgccagtcattcaatgaactgccgccttccgcacacgggatcaagccaatttcttcatcgggataagctttcgaccaagcatctgcaaaagatgccgccaagccaacgccggaaaccggacggtcgtaattaatcggctctgtcatcatctgccactgtccattgcgcagcatttttattttttcattatagatagggtctacttcattcaaaaatccacggcccgccatattcgactgccccaacattaaaaaagactttatcatttaatttttcacttctttacatcaatattttagtctaattagactatagtcgattcagcttgtcttgtaaagttttaataaggttttacttttattattagtatgtatgaaaagcaaattaacattgaaaatttggtggatgtatttgagaaatagcaagttcttttgctttagatcttgataaacaatgaaaaacaactaaaaccttgtcatgtaagggttcctatgaggttcaaaatcatttttcatagaaaatacattcaaggatgggggtgagcccaaatgaaatggattgttaaaaagggagggctgtgttgaaggggttaaatatcaataaaaaattattgaaaaggttaacaattgtaccaattctattcatttgttatgttttacttttaaatcctgaagttatacttgaagaggaatgtcctaaaatgcagaaaaatgatccggcttttcgctcactttcccttcttcttccgcttctccttttttacgcccggtaaaactcatgaaacatcttcatcaatgcgcgtttttcaatccgcgacacataactccttgaaatgccgagctcctttgcgatctcgcgctgcgttttttctttttttaaatcaagcccgaagcggccgacgatgacttccttttcgcggtcgtctaaaatatcgatatattttttgaccttttcaagttccatgttgagctgaatggtgtcgatcacatcctcgctttccgacttgaagacatcgatcaggcttatttcattcccttctttatcctggccgatcggatcatgaagggagacgtcttttttcgtttttttcaatgcgagcagatgcattaaaatctcattattaattacaaaagggggggtgcatagatttcccgtaactgtttgattaaataaatgttgagtcagtttcctgtaaggaccgtggaattgtcgtttatcgggtccataaggacacttcatggcatttagatgaacagttagaccttatggttccagacgatatggtagtggaagatgattttcttttaggtaaggtttgtacgccggacaaagctagtgaatcaataggcctgattttaaggtgcaaattatccaatagtaaatctctgtataatcaattataattttggtagtaagaaatattatggattgaggggttttaaatgaaatcaatattcaaagagttttattttgataataagagctctgatatatggataaactcagtagttattttagatgcaaatgttttattaaacctttatagatattcgaaggaaacttcaaaaaagctgctctcattattaaaaaaatcacaagagcgtctttggctacctcatcaaatagctttagagtttcatttaaatagaacaaatgtaattctagatcaacaaacatcttatgaaaaaattgaatcaattttaagtaaaaagtcaattgagatagagactagtctaaaaaaagagttatctacatacagaaaaaaacatgtaactttaagtattgactcaataatagatcaagttaaagaatcgattaatactttaatttctgagataaaacaggaaaaagaagaccatccaaagttacttagaaatgatcacattaaagctgaaatcactgatatatttgaagataaagtaggaaagccatacgaaaaaaagaggcttgacgaattatcaaaagaggcggagcaaagatataagctagaaattccaccaggatataaggatgcatctaaaaagggagctaaattttacaatggcgaaatcatattagagaaatatggggattacattctgtggcaacaaattatggattttgcaaaagaaaaacaaacaaatattatttttataacggatgatgataaagaagattggtggtattactcaaaaggaaaaacaattggcccgcgaagtgagctattaaatgaattttcaaataaaactaatcaagagttttatatgtttaaaccggaagttttcatgaaacaggccggtaaagtttacagtgaaaatttctctgataacacgattactgaggtaaaagaggttagcaaggaaagtggggattatcctttatttgttagggatggaacgaattatatgagtacgttgagccaattaaatcaattttattatggcgagcacacatttgaatacataatattacttcaccataataaatacttatcagattcatttttaaccgatttaactgagggtttcccttttggtgaagagtttagttgccgcataattgactcaaacattccatctgctaaatctgttaactatagctttgagagtaagctagctatcaaagtgtatttggacgatacatggatagttggtaagagtgaatactttaaaaatttaactttaacgtatttcaatatgaaacttaatgattgccaagtggaaattttggaatagtcctagacggaaagcctgcggacactgaacttacagcatttacgctgtttgtttggtgtccgtttttaatttgattatataggaggactactcatgaagcaaaaagacattgaaaatctaatcaatagctatcactggatggtgaaagaggttcaacggttgcaaagagtactttacggttcaacaattcctatgaaaaattggggtattgctaaatatggattagaggcagctatgccgaaagggagtcttggaaagagtcaggatgaattgcggcaaatggatatgagagaggaacgtctttttaaacgtcttaagtactatgaggaacgagtatatgcagttgagttgggggcagaaaagatcaaaggagagcaacataaagtcatttataattgcaagatggagggtatgagctaccgcgcaataggtcttcaccttggcatttcacgggaaactgtacgcaaaatgaaagacgagttgatccagccaattatgccaagatttccattttgaggtttgttgaatctgaaaaaatctgtggtgtaaaatgggaggcaggtcggcgcggcgaattattcctgcgtcatcactaaatttttacatagtgaatgggtgataaaacagcaacagtattgcgtgcttattcaacagtttcgttcgacaaattttgcaaatggttaatcataacaattaatttccgatattaaaaatgggggtgatttgtaaaatgaataagaacaaaaagaacgataatagaaagaataataagaaggatttagaagaactggagaatgttatttatacttattccaaaaaggagctactcgctttcttttttgaaaaactcaaggtaggtcaaagtaagagtcattacaaggactttcaatctcttgtatatgagttagatattgaatgtttagaatttgcgatatcaagattttctcatatagatattgtacatgatcattcaaaatatgtgcctgcatttatccctttattggcagcgtatctcactatgttctttaatttttatgaaaaacattggggagctttagctttcgctgctggtacaattgctgctattgtttggataattgcagtagaaagaaaatatagaaatcaagcgatttcaattttggaaacatttaaacaaatcaaagagagaaaagagaaagacagatctaaaggctgaaaggagaaattatgaataaggataaattaaggtatgcaatcttaaaagagatttttgaaggccatacccctttgtcagaaaacgatattggagttactgaagaccaatttaatgatgctgtgaactttttgaaacgcgaagggtatataattggggttcattattcagataataggccccaattattcaaattaggacctgagttgacagagaaaggtgaaaactacttggaagaaaatggaacatggtcgaaggcgtataagaccattaaagagattaaagattggattaaataacatctgcacccttaggggtgcttttttgttagacaaattctgcaaattatactttgtccttttcttacaccgataataaggtgggaggagattatatgagttttgaaacaaagtatttaataaggtggggcatatcaggatggatgttaattttctggataggagcctattttgcacttactgaagctgactatatatcagctcatataaagttttctgagcacgggaaattaataggggttttcatttctctgagtatatttggcatggtagtgggctatataattcatcatttatactttgtagcgaattggatatttaataaaaatcggatttttgataatgcaattaagcgggttgaaaattttccgatacctgacaattggaaagataacaataagaacgattatttagaagaagataaaagaatcgttgaaaggtatagatacctgctatcaaaaattcatgccttgggtactgtattcgtaagtcattttttagccgttttgtttacagtgatagcaacactgtataagtatggctgtttttcttacccgccgatgttaattatacaacttgtaatattgtttatttcggaatcaagtttcagatactactctgcaaacttaaattattttcaaggaagtttttttagacaaaatgttaaaaaataagatttagcatcctacggggtgctctttatattctctgtaaactgcttccggcgggattatgaatcctactcaagcttcaacttttattcgaatggttcaagacacgccaacgattttaagagatgcgctaactaagaatcaaaagtctgttccatcaactagcacagttaacttaagcacaaaagaagtaattgctgaagttaacattacctatgccacacttgaaaacaacatcgaacaagaagtcacatacagatgcgacttctataagtttccgattaatggaaagtaatcttaagaaaaaatttaaggacttgcagccctatagccgtataaacaaatttaatccctcataatatgtcatcaaacttagcatactcaatatggattccaatttaggagtttaagagccattgatgtgctcataaatatctttcacatctagcggacagtgggcgagtaaaatacgtcactatgcatatgctgtattttttcccagttggcgggattggttgtatcaaaagagcggtgctctaaaatggcctgatatagggcggttttttgttccaaatgggcaatgtgctgtttggcttcttcgagctgggcgagcgcatcttctttatgctccatcatgagtgtgtaccgttgtggaatggtcgaatctccttcaagacagagattcacgtacgttttaatgacttcaatcggcatcccggattgcctgaggcatttgacaccaaacagccagttgattgattcttcgtcgaacaaacgaatattgtttttattgcgctgtacgctcggcaccaggcctttatctgtgtaaaagcgcaccgcatgctcggtgagtccggttatcatcgctgcttctttgactgtatgcatgggtaaccctcctttaaaaactttttaaaaaagtgcttgccttcgtgttacacgaaggtaataagcttattataacgcaaaccagccgcagcggaattcattctgcagtgcccgattttcgggatgcgtgccgtttgtcgtttctacatttgaacaataggaggaattacaatgcaaaccgtaacattaaacaatggagtgaaaatgccaattatcggcttcggtgtataccaagtccccgatgctcaagaatgtgaaaacgcggtatatgaagcactgatggccggttatcgcttgattgacactgcttccggctacctaaatgaggaggcagtcggacgtgcaatcaagcggagcggcgtaccgcgtgaggagctattcattacgaccaagctctggattcaggatgccggctatgaaagcgccaagatagccttttccaaatcattgagtaagctgcagctggattatcttgatttataccttattcaccaaccatacggcgattactacggcgcttggcgcgcgatggaggatctgtatcgcgaaggaaaaatcagggcaatcggagtcagcaacttccatcccgaccgtctaatggatctgatcatgcataatgaaatcgtgccagccgtcaatcaagtcgaaacgcatccattctgccagcaaaaagaaagtgctgcttttatgaaagagcagggagttcaacacgagtcatgggcaccgttcgctgaaggacgcaataacatgttcagcaacggcgtgttgacttccattgcggaaaaacacaataaatccgtcgcccaggtcgtgctgcgttggcttgttcagcgtgaagtcgttacgattccaaaatcggtgcgcaaagaacggattgtcgaaaactttgacatttttgattttgagttaagtttagaggatattgaaaaaatttccacacttgataaaggagaaagtcttttcgggtcgcaccaagatccggaaattgtaaaatcgataggcgccatgaaattcgatctgtaagctttgtctaataaaacagttaggtttaatgaacttaaaaggttaatcccatggattacacagagaatattgatacgaaaacttagagaattagaaccttatcgggtatgaaaattattcgaaaattccaagtttgttcataaggaagggttaatgctaaaaagactgcgtgcaacttacattttaacggaagaacaatttgatgagatggttaaaccagaaaatctgaaacctaatatttgaatcttttaagataaaaactagttactaatcagtaactagtttttctttcagccagatcgaggtctgcataaagaaagcagggaatgaagtatgcctgtgaaggattttctgaggagctttttagagcgcccggcgttgaatcgtttgagagaggacgcaagttaaggacttataagtcaagtcatttgataccaaaatgcagtaacgaatgagaaaaatgatattttcataactgtcatatctctttttctatattcttactttattgaatgtgagtcaccggtggatattatgccggctgaagtgatttccgtttcatctattgaaataaggcttaatgaaaatgacaaattaataatacctgctgatttgattattattcctaaacggttgcgctctggagaagatgaagaactgaaaatgggtgagaatttgatggttttctccttaaaaggcggacaatcattttttattctcgataaaatttaatgataataatcctgaaaaaataaataattgtaaagacctaatctatgctatagaataactataatattttgaaaatttcatccgaggtgggttatgaaaactattggtcttattggcggaatgagttgggaatcttcagctgagtattatcgaattatcaatgaagaaataaaaaagaagttaggagggcttcactcggcaaaatgccttttatacagtgttgattttaaggaaattgaacattatcaatccataggagcttgggataaagcaggtgaagctttaggtcaagttgcaagatcattagaaaaagcaggtgcagattttattgtaatatgtacaaatactatgcataaagttcttggatatatccaagaaatgatcactatacctattttgcatattgccgatgcaactgcagaacaaattattagacaagacattcgctcagtaggattgctaggtactaaatatacgatggaacaagatttttataaatcacgtattgcgtctcatgcgattaatgtcattgttcctgatgatgatgaaagagaattaataaataatattatttatcaagaactatgtctgggtgaaattaaacagtcttccaaaaacatttataagaagatcataaataatttggtggataaaggagcagaaggaatcattcttggatgcactgaaattggcctattagtaaaggcagaggattcaaaagtgccattatttgatacgactttaatccatgctcaaaaagcagtaaataaatccctttcgatttcttcttagaatgattacttcctatatgttaaaaccgctctttaggagcggtttttattatggttcattcaatcaataaatggaggaacgttataggaatgatcttatcatgcccctttcctcagaaattgaatttgatgatattgaagatgacagcgaagttatagagacctcgcaaacctacaaaattgattttgaaaatggccgtatcacaaatgaaatgatcacaggccttgaagcgatcaagcagtttgtatatttatcccttcatactgagcgctacgcatattctgtttatagtcatgattgaaaaagataaaatagaaaaagccgggatgtcagatccggcttttcgctcactttcccttcttcttccgcttctccttctccgcccggtaaaactcatgaaacatcttcatcaatgcgcgtttttcaatccgcgacacgtaactccttgaaatgccgagctcctttgcgatctcgcgctgcgttttttctttttttaaatcaagcccgaagcggccgacgatgacttctttttcgcggtcgtctaaaatgtcgatatattttttgaccttttcaagttccatgttgagctgaatagtgtcaatcacatcttcgctttccgacttgaggacatcgatcaggcttatttcattcccttctttatcctggccgatcggatcatgaagggagacgtctttttttgtttttttcaatgcgcgcaggtgcattaaaatctcattttcaatacatcgtgcggcatatgtggcaagcttcgtgccttttccggctgagtagctttcaattcctttaatcagcccgattgtaccgatggagatcagatcttctgcgtcctctcccgtgttttcgaattttttcacaatatgggcgactaaacgaagattatgttcgatcagcatgttgcgggcgtgttcatctccttcagccataaggtctaagtattttttctcctcattatttgagagcggttgtggaaaggcattatttttcacgtatgatactaaaaacacaagttctttcacaataaacccgagcgctgcaaaaacacctgtcaccatcctcacctccacaaagttatgtaggcaatcgcctatatgtaactgtatgtgtcggtagggctgtttgtgtctgtacagggaaattaatcaaaatcgggttttatttcttacagcctcttgatttttgctgattgagcctgtatattgttaaaaaaagtaagggtgaaaacaatataaacgaaaagcgctgaagagacgagtagacagatatcattcatgacagagagctccgggagctgtgaaggagtatgaatggatgtgttgaaacaaacctcttagcttcgcatcggaatcatgcaacacgaggatgatgcggcggatactcctgttaccgagtaagctttgtacccggcaaggccggcaccaaaccgaattgaggtggcatagcgggctgtttcccgtcctcaagactttattgtcttgagggcgttttttatttctaagggagggataagatgaaaaacctgaagtcttggcggtacccgatgcttctgttaaccggaatcgggatagcaaatattggtgaatggatctattttttgtctcttaatcttattgtcttaaaagaaacggggtctgcttttgcggtttccatcctttatttaatcaggcctgcggctgttttgatgacaaatgggtgggcggggagcatcatcgaccggtgcaacaaacggaatatgatgatgtcgcttgatttcatccgggctgcattcattgccgttctgccgctgatgtttactgcacggtctttattttccgtttattgtatcgtatttttgattcaaatggccaatgcgatgtttcgtccgtgttccatggcgtatgtgacgatgcttatcccggctgaaaggagaaaacgattcaattcactaagggctttgtcggaatcaggggcttttctcctcgggccggctgcggccgggctgctttttatcgccggcacgccgatttttgcgatttgggtgaatgcggcggctttagtgctgtccggtttcattacgatgatgctgccgaaccttgaaaatgggcctcacgtacattctcccgcacagaagctttctttggcaatatacaaagaagattggaagctcgtctatcgcttcagccgaacagcgcgtaacgtcatgatcatttattttttattcagtctggtcatgactgttatgccatcagcgcttgattcgcttgaagccgcttttgcaaaagaggttcttcagctgactgatgccgattacggttttctcgtcagtgtctcaggggcaggcattattgcgggggcgcttgtcaatgtattcattaataaaaaaatgccggcttctttattgatgggaatgggctctttattcacagcggccggatatatgatttatgcgttttctgacgttttttggacggctgctttcggatttttccttctcgctttttttctggcgtttgccaatacaggctttctgacgttttatcaaaagaatgttccggtggacatcatggggagagtggggagcttttattcattagtcgaagccgtcttcattatagtagtaacggcggttttcggagcggcttctgtcagttcttccgtccgcggcatcgtcatcgcaggcgctgctgttatgctggcgttggcagccgttttatgctcgttcttatttgcggccgcaaaaaggaggactcctgatgtatttcaagcggatcaatttaaacaaacataaagagacggccgtttcgtttcgtgaggattcgtttttcgtcagctttggcacggcggatcattttaataaggatgaatatctcaggttgctgtcatcccaaatcaaatgctttcccgacggttttatgctgctttttcataccgggcagccgatcggacagcttgaagcttccatcaaattttaccgcagccaaaaaatcggttatgtgcacctttactatatgactgagcagcagaggggaaggggttgcggaacgaaactgcatcaatacgtgaggcagtttttcagagcggctttgtcattttacagaaagaaaaatatggtagtggtcggttcagaatgagaggagccgtaccgccggaatagggggcggtacgcgcttcattttttcgttgtttttaaaaggccgggaaacttcttataaatgaccgccattaagacgagcatatacattccgtaaatcccgaaagacagcagtttgttgcttgtaaatgaagcgcctgcgacggtcacgatcacaatgttcggaattttgccgagcaccgacgcagaaaaaaagatcggccatcggatattactcaacccgcagacggtattcatggcaagcgacggtataatcggaatcagccgcccgaaaagcaccgccgtaaacgcgtgctgatgaaatgaatcttcatattgggccgctgccgggtaagccagcagcttttttctggcccagtctctgaatccgtaccggacgagaaaaaacaatgccattgttccgagcatcgcgcctgacaatgtaatccacaccccgtttacaatcccgaaaaccgctccgtttaaggccgcgataatggcgaatggaacgatcggaaaaaatacgtcagctgcgaccagaaggatactcataagcacggcgtacatgccgcccgcgcgaatcatgctgagccagacgtctttttgcataaagccgatcatcacgacagcaatgatgacggcaagactgaatcccttttttatcatctgcacgttcacctctttttcaaatagtatacagcacaaatctatctccttctattaaaataagctgtccgataagcgtatttgatttatcagcatttgccgtttgatgagaaacggctggcacccgggtttggacaaaaacaagcgggaagcgggtgatgtgcatcatttgatgcagagaatgattttttataaaaggggacacgttaacagtagtgtttactggaggtgtaaacgttgagatgctttcatctgatcatcatgatatgcgtcctcacgagtctcactgccgtgtccgccgatgcgaaatctttaaaaagaagtgacatggagaaaacgggaaacgtgtactgggatataaggtctgaaaaaaagaaactatctttaaccttcgatgacggcccccatcctgtctatacggaggctgtgttagacgtgctgaaacagcacaatgttaaagcaacctttttttgtgtcgggagccgtatagacaaataccccataacggcaaaacgcatcgttgaagaagggcatgaaatcggcaaccatacgatgaaccatgtttattttcaccgactgaaacgcaaagacattttacaagagcttcacagctcagcgcatcatatcacatcgctgcagccggaaggggacaagttattccgcccgccgggagggtcgctgaatcatacggctttcaaaagcatcttaaaagagggctatcatatcatcatgtggtcatggaaccaagatccgagggactggaaaaggcccgggaaaggaaaaatcgtcaggcacgttgtttcacatgccagagatggagatatcgttcttctgcatgatggcggaggaaaccggcgccagacggttgaggctttgaaagaaatcattcccaagctgaaaaagcagggctacacgtttgttaaggtttcggatttgatcggacaggattccggtccttttcatatccagtaaagagagcgccgcgttgaaagccgccaaagagatgtgtaccataggaggtaaggtttgggggggagagaaaatgaagtttgctgttctttttattacgataatctgtctgttatcaggatgcgccgcgggcaaagaaaaaagtgttgtcgcattcggcgacagcaatacgcgcggttccaactgggattatcgtgattatccgaaggcgcagcagtgggtaaacatattaaagacagcggaacgcggccgtcttacggttataaatgcgggaataggcggccagacgactgaggatgcgcgcctgcgctttcaaagcgacgtgctggagcgtaagccccaatatttatttatcatgttcggaacaaatgatgcgggcattttgacgggcgatcagccgcgggtatcaaagaaacggtttaaagaaaacctgacttatttcataaacgaaagcagaaatcacggcataaagccgattttaatgacgtgcatcccggttatagaaggaaacggaacgaatcatctctattactattcgagatataaagcctcagcctttaaagaaaaaggcggtgcgagaaaatggcataattcctataacagcgttacgaggcaggttgcagctgagttaaaagtgccgctggtggataactggaaacactttatacgcgcggacggcggcaaagatacagaccgggcgctgatccaatccggactgatagatccttccggaaatcatatgacgccaaaaggcgccagaatcttaattgaaggcataaaaaatgggcgggttttggaacgctgacgccgtcagctgcctaaaccgttttgcttctgcttcataggctgtagaaaaaacatctttttggaggcgattgctatgaaccgcggtttccctccgcaacatcctgtatgcccgcctcctcgggtgaatgcggggtactggtacgcattttttgttgtgctgctcgtcgtcattctcgtcctgggcggtctgtattggttcaatatatagcagccgtcctcttaaacacctctattttaggggtgttttttgttgaaagtggtagtaatgcgcataaccgaagtgatataatatcagtcatctgagtaaaaaaaggaaattcgcccgggaacttttttctgtttaagaagaaacggaaataatgtgtccgagcgatcttcttttgatttcgttttcaattaactcgataaattcacggctcaaattcatttcattggctttgaaataagattctattagtaattcatcagaaagctttctcatgccggggacccaattaatgggagtggcacctccttacaattgtaatcaatcatcagacgcaagcatatgatggaaggttgcgtttcaatcatggtgaggttatctttaatctaccatgaaatacaaataagaacaatcgttctgttatccacactcgtacgtggataacttgttagtatcttgtttataatctggataaatccggatgtaataagagtggataatgtgtgtaattttatccacaactggtgaagaaacccaatttttgtcgaaatttttttactgtgtccgactttgtttttaaatctgacaggtttcgacatatagatgatagaaagaaaaggaagggtgcgggttttgttaaaaaagttttttttacctgacgaatttgtgaaaaatatatttcatatcacaccggaaaagctcaaagaacgcaatgtgaaagggattattacagaccttgacaacacgcttgtggagtgggacagaccgagtgcgacacctcgattaatcgagtggtttgaagaaatgaaggagcacggcattaaagtcacgatcgtctccaataataatgaacgaagagtgaaattattctcggagccgcttggcataccgtttatttataaggcaagaaaaccgatggggcgcgcctttaaaagagccgtcagcagcatggatctgaaaaaagaagactgtgtggtcatcggcgatcagctgcttactgatgttctcggcggaaacagaaacgggtatcatacgatcctcgtcgtgcctgtcgcttcctctgacggagtcatgacgcgctttaaccgccggattgaacggagaatattgagttctttgaaacgtaaaggccatattcagtgggaggattagaaatggaaaaggttgtttgcatcggctgcggagtaacgatccaaaccgaggataaacaaggtctcggatacgcgccaaaggcatctctcacaaaggagaatgtcatctgccagcgctgcttcagactgaaaaattacaatgaaattcaagatgtttcattaacggatgatgactttttaaatatcttgcacacaatcggcgatactgactctcttattgtcaaagtcgttgatatttttgattttaacggaagctggataaacgggctgaaccgctttgtcggcggtaatccgatcattcttgtcggtaataaggccgatatcctgccgaaatccgtaaaacgggaacggctcgttcaatggatgaaacgcgaagcgaaagaatacggcttaaaaccccttgatgtctttttaatcagcgcttcccgcggacaagggatgaaagaagtcattgacgccattgaacattaccgcgaaggccgcgatgtgtatgtggtgggctgtaccaatgtcggcaaatccacatttatcaaccggattattaaagaggtctcaggggaagagaatattattactacctctcaatttccgggcacgacgcttgatgcgattgaaatcccgcttgatgacggatctgcgctttatgatacgccgggaatcattaaccatcaccagatggcgcattacgtggacaagcgtgacttaaaggtgctgacaccgaaaaaagaactgaagccgcgcacttttcagctgaatgaaaaacaaacgctttatttcggcgggcttgcccggtttgactatgtatcaggcgataaaacggcgtttgtctgctatatgccgaatgaattgatgattcacagaacaaagcttgaaaatgctgatgccttatacgaaaagcatgcgggagaactgcttaccccgcccggaaaagatcatttggatgaatttccggagcttacaccccatacgttttcgattaaagaaggaaagacggatatcgttttttccggtctcggctgggtcacggtgcagcaagcagataaaaaaatatcggcatacgctccgaaaggcgtacacgtatttgtccgccgttcattaatatagagagaaggggagagggagcatgaaacaattgtacggagtaatcggaaatccgatcgggcattcaatgtcacccgatattcataacgcggctttgcaagataagaacatcaacgggcagtattttgcgtttcaggtggaacctcatcatctcaaggacgccgttaacggaatcaaggcgcttggcatctgcggagtgaacgtcacagtcccgcataaagtcgcgatcatggagcatctggatgaaatacatgaaagcgcgaaagtactcggggccgtaaataccgtcaaaagagagggagacaggctcatcgggtataatactgacggagatgggttttataaatccttagtcaaagtattggacaaaccgatatcagagctctccatccttatgattggggcgggaggagcggcaagagcgatttttacgacgatcgtccgcagagagccgaaacaatttgacgtttgcaaccgcacgccggaaaaagcagaaagtctgattgcggctgctccctcttttcagcagaaacgcgtccttactttaaaagaagctgaaaatcagcttgaacaatatgacgtcattattcatacaacatctgtcggcatgtatccgaaaacggatgccgtgccgctctcattggaacgggccaaaacgggcgccatcgtttgtgatatcgtatacaacccgattcaaacggcgttcttaaaagaagctgaaaaaagaggtttaacaacccttgacggtgtcggcatgtttgtggaacaggccgcactgtctttcaagctgtggacggaacaagagcctgacagcggcttaatgagagcaattgttgaaggaaaactaggaggaacacaatgttaacaggaaaacaaaaacggtttttgcgttcaaaagcgcatcatttaacgcctatttttcaagtgggaaaaggcggagtcaacgaaaacatggtgaaacagattgccgaggctttagaagcaagagagctgattaaagtcagcgtgcttcaaaactgcgaagacgataaaaatgatgtcgcagaagcccttgtgaaaggcagccgctcacaattggtgcagacgatcggaaatacgatcgtattgtataaggaatcaaaggaaaataaacaaatcgagcttccgtaaggtggttgacatgaagaaaatcggaatattcgggggcacatttgaccctccgcacaacggacatcttctgatggctaatgaagtccttcatcaggcggagctcgatgagatttggtttatgcccaataaaatccctccgcacaagcagaatgaagactttacagacagccggcaccgggtggagatgctgaagcttgccatcagctcgaattccggctttaagcttgagcttgcggaaatggaccggaaaggcccttcttatacctatgatactgtccgtttactgaaggagcggcacccgaacgacaagcttttctttattatcggggcggatatgattgaatatctgccgaaatggtacaaactggacgaactgctcacgctcattcaatttatcggagtgcggcgcccggggtatcatattgagaccccgtacccgctgctttttgccgacgttccggaatttgacgtttcgtcaacgatgctgagagaacgtctcaaagcaaaaaagccgacgcaatacttaatgccggataaagtgaggcagtatatagaggagaatgatttatatgaatcgtgaggaagcacttgcctgcgtcaaagaacagctgaccgagcatcgctacatccacacaatcggcgtgacagatacggcggttattctcgcaggccggttcggagcagacccgaaaaaagcggaaatggctgctatatttcatgattatgcgaaattccggccgaaagaagaaatgaagcagatcatcgtgcgggaaaaaatgccggctgagctcttggattacaatgccgagctgtggcatgcccctgtgggagcgtatttggctgagaaagaagcggggatcactgatcctgagatcttggatgcaatccgctatcacacgtcagggcgtcccggaatgacccttttagacaaagtcatttatgttgcggattacattgaacccggccgccattttcccggagtggaagaggtgcgccgtctggcggaaacagatctgaacgaagcgctcatacaagcgatgaaaaatacaatgatatttctgatgaaaaaaaaccagccggtctttccggagacgtttgcaacctataattggctggtgtctttaaaattgacaggaggaatttgaagaatgaatcaagcttccgtattaaaaatcgcggcaaaagcatgcgacgataaacgtgcagaagatattttagcgctggacatggaaggaatctcacttatagcggattactttttaatctgccacgggaattctgataagcaggttcaggcaattgcgcgtgaaattaaagatcaggcagaagaaaacggcattgatgtgaaaaagatggaagggtttgatgaggcccgctggattttagttgatctcggcgacgtcattgtccacgttttccataaagatgaaagaagctactacaaccttgaaaagctatggggcgacgcgccgctcgcagagcttgagctcggcttgaactcatgatttaccaaggcttcgccggcgtatatgacgagttaatgtcacatgcgccgtatgatgaatgggcgggctggatcgaagcgtctcttccggaaaagggaagggtgcttgatcttgcctgcggaaccggagaaatatccatcaggcttgctgaaaaaggctgcgaagtcacggggattgatttgagtgaagatatgctgagctgtgcccagcagaaaaaaacgggaaagccgattctttttctccagcaggatatgagagagctttccggttttgaagaacagtttgatgctgtagtcatctgctgtgattccctaaattacttaaaaacgaaaaatgatgtcttaagcaccttcaaaagtgtttttcaagttttgaaggaggacggcctgcttctgtttgacgtccattccccatataaaatgacggagctttttccggacagcacccatgcggatcaggatgagcagatcagctatatctggcaaagctttgccggcgatgaagagctttctgtcatccatgatatgtcctttttcgtatggaacggacaatcttatgaccgctatgacgagacgcatgagcaaaaaacattttacattgaagaatatgaacaaatgcttgcagagaccggatttgaactgaagaaggtgacggctgattttacagaccggcctccttcaacagagtctgaacgtcttttcttcacggcaggcaaaccaaaaaccatcgtttaaacggaacgatggtttttaaaatgcattttttgcgattggcgagataaagcactttatggcatactcagttacacgtgaaattgcttcttcactaacgatatatcttcatcgtatttgtcatgtgtacgctgaaagacacggttgaacatatcctgaacaccgctttcgagagccttcagtccttccccggtgacgccgccttttacgcatactttttcctgcaaggcgggaagtgtgtaatgccctgtttccagaagctttccgagaccgacaagcatttccgtcgacattatcacggcttcttctttggtgatgtccgtttcttccactgccgcgtcaataaagcgctgaacgagataactcataaaagcgggcccgcagctgacaatgtctgacgccgctcttgtaatgccgctgctgatttccacaggttttgaaatatgagtgaacagcgtttgaatatccgcttttgcagactcgctgcagcttttgccgaacgtaacaagcgagacgccggccaaggcgcggttcgtaatgctcggaatgacgcgggccgtctgacacggaaccgtatgttcaatctgatccgtctgaacgggactggtaatggagattaagatgtgatctttccgtaaatgcggtgtgagtttcttcagcaaaggatatatatccagcggttttacacaaatgaatattatttcattttcctgtacgagcttttcctgatcctcggtgacatggatgccgctgaaacgttcttttagttttaatgctttttcgattgttctgtttgtgatggtgatatgtgagggatcggcagcgtttgattcgataaacgattcaatcaggatcgttcccatgtttccggtgccgataaagcctattttcaatgaattcccctcctttttcccttaatcctctaaaccttatgcggggaggcaatgcaatatgacgaaagcgatgatgacggagcggctgcggcggaacctgaaaattctgggcgcttgtcttgtagcaggggcggtttttatctgcatttggctgtttcgttctgaaaaggaagagccggtcaaacagcagtccgtgctcggccaaacagcctcagcatccgtcgcggacaaaaaagacaccgcagacgacaagattatgattgatttgaaaggcgcggtccgaaatcccggcgtgtatgaaatgaaagcgggagacagagtgactcaagccattgaaaaagccggcggcctgaagaaaaaggcggatgaattgaacgttaatttagcagagcagctgcaggacgggacgattgtttatattccgagtgaaggcgaagaggagaatcgcccgaaaacagcagcgggtgaaaaggagaatgcagctgtcaatatcaatacggcatctctggacgaacttcaggcgatttccggggtggggcagaaaaaagcggaagcgattatcgcctaccgagaagaaaaaggacggtttcagactgctgaagatttgatgaatgtatcaggctttggagaaaagtcatttgagcggataaaaacttccattacggtaaagtgaattgacggttctgcttaaatctatgtaaacttagaaaagcaacaagactttttggagggaacacttgtggaacgaatctcatggaatcaatattttatggcgcaaagccatttgctggcgctgagaagcacatgtccgagactgtcagtcggggcaaccgtagtcagagataagcggatgattgccggcggatacaacggctcaatcgccggcggcgtccattgcgctgatgaaggatgccttttaatagataatcattgccagcggaccatacatgcagagatgaatgcgattctgcaatgttctaagttcggtgttccgacggagggcgccgaaatttatgtgacgcattatccttgtattcaatgctgcaaatcaattatccaggcaggcatcaaaacggtttattatgccgaagattacaaaacacagccttatgcaaaagagctgttcagccaagccggagtcaaggtggagcaggtcgaacttgatgaaatgatcatcgatctgaaaaaccgcgaaaaattgtcttttgtagcaggtctgattcagcaattatctgatgcgggggttaaggcagatgaactgaaaaaaattcatgaacaggccaatgagctgtttaccagttacgtataaatgaaatataaataccttcttctgcctctggcggcggtttctgcaactgcgggaattgccgccgctcatgtcttctgggttctgctcctttttcttctgtatcttctctttattattgtaaaaacaaagcaccatgctccggttatcgtctgcctcgtttctttttgtgtttatttctttctttatacggtttgtgacgctgcgaatgtaacgcggtatcaggccggcagttatactgaacaggccgtcatcactaatattccgaaggttgacggagcgaaaatgtcagccgttatccgtacacatgacaaggaaaaatgggcggcttcgtacaaaatccgttctcttgaggaaaaaagacttattgaacagcttgaaccggggatgcgctgcacgtttacaggctctctggaacagcctgcacatgcgacggttcccggaggttttgattataaggaatatcttcactctcagcagattcactggttattttccgtgacttccattcagcagtgtgaaaaatccaaacagccgctgtttaaactgctgaacatcagaaaaaatttgatttcgatcattcggaatcacgtgcctgaatcttccgccggaattgttgaagcgctgaccttaggtgaaaaattttctatagaggacgatatactgagtgcatatcaaaatttgggagtcgttcatttaatggcgatttccggaatgcatgtcggtcttattacggcgggattattttatgctctgatcagaatcgggctgacaagagaaaaagcgggaattttgctgctgctgtttttgccggtgtatacgctgctgagcggtgccgccccatccgtattgcgcgcatccctcatgctgggattttatatcgccggaactcttgttaaacgcggcattcattcctctgctgcattgtccctgtcttatctgctgctcctgatgtttaatccttacttcctttggcaggcgggcttccagctttcctttgcggtaagcgcctctttaattctgtcatcctccattttaaagaaagcggggaaaagcagacttgccgggcttgcgatggcttcattcattgcggagctcagctcacttccgtttcttctctatcattttcagcagatttcacttgtcagttttctgatgaatatggtgttggtgccattttatacgttatttgtcattccggtttctgttatcggtttccttcttcttttactttcaaggcagatgggagaatgtttgtttgatatgttcgaccttgtgatgaagcctgtgcatgatttcattacatatgcggcatccgttgatttatttactatgattgtgtcaaagcctgattttgtttcccttcttctgcttgcggtttcagtttttacgctttttgcggctttggaaaagggaggttttttaaaactcaggaaatcggctctttttttctgcgcggttttggcttatttaatatgccgtccgtatttcagtccatggggagaagcggatatgcttgatatcgggcagggagactcactgtttataagcgcgccgcaccgcaaagggaccgtaatggttgatacagggggagtgatttcttatcccggagaatcatggaaagaaaaacgccacccgtattctatcggcgagaaggttttgattccgtttttaaacggaaaaggggtgaaaaagctggatgcgctgattttaacccatgcggatcaagatcacatcggagaagccggagtgttaatcaaaaatcatagagtcaaacggttaattgtccccgtgggattcgtaaaagaaccgaaagatcagaacatattaaatatggcgaaagaaaacaacattcccgttgccgaagcaaagcggggcgacaccattacagccggtgatcttcagtttcaggtgctgtctccggagtcgtctgacggaaggagtaaaaatgattcgtcactggtgctttggacggttttaggcggagtgagctggcttttgacgggagatttagaatcggacggcgaaacggaagtgctgaaaacgtatccgaaactgaaggctgatatattgaaggcgggtcatcacggcagcaaaagctctacgagtgaagcctttttgaaacagcttcagccggaagcagcgctgatttcagcaggaaaagagaatcgataccatcatccgcatgaagaagtgctggatcgtttgaaggtgtactctgtcaatgtgcttcgcaccgatgtcagcggaacgattcaatacagatttaaaaaaggcgccggaacgttttccgtcttccctccatatgatatagaagaaaccagggcgcaagaagtaaaaaagactgccgattgacagcagcccggaatgcggctaagagccgataagatggatggctgttgccatcacgaacaaaaaggcgaaaaatccgaaggacacgacaaaaccgacagctgagtcaacagcatcatttcgtttgctttgaacgtttttttcaaaatcattcaatttcatccctcctgacttccctaagtatactggaattgttttgaaaaatctagaagtgatggtaacgttttctgttcttgtgattatcgcctttttacaagcagacccgggagcatgtgaatcaggcgtttattataaatgaggaagctgtccttaaagcttcctctttactatttgccgaactcaatttaggatagaaggggatcaagaaagagaggaagtcatacgatcatggtatttgatgtttggaaagccctgaaaaaaggggatgtccgctccgtttattgcttatacggaaaagaaacgtatctgctccaagagactgtcagccggatcagacaagctgtcgttgatgaggagacaaaggattttaacctgtctgtttttgatcttgaagaagatccgcttgaccaggccgtaaccgatgcggaaacgtttccgtttatgggagagaagcggctggtcatcgtaaaaaatccgtcttttttaacaggggaaaaaaagaaagaaaaaatagagcataatacagccgctctggagacttatctgaaggagcctgcaccttacacggtctttgtgattgtggctccgtatgagaagctggacgaacggaaaaagctgacgaaagcgctgaagcaaaaagcccttatgattgaagctaaggagctgaatgcaaaggagacgactgattttacgattaatctggcgaaatccgaaaataaaatgatcgatacagaagctgccgagcatttggttctgcttgcaaacggccatctgtcttccatatatcaggaaatacaaaaactctccgcctacaccggtgacagacatgagatcacacttgaagatgtccgggagctcgtcgcaagaagtttggagcagaatatttttgagctgatcaacaaaatcgtgaaccgaaaacggacggaaagtcttcaaatattttatgatcttttaaaacaaaacgaagaaccgatcaaaattatggcgctgatcgccaaccaattccgtctgattatgcagacgaagtattttgcaggacaaggatacggccaaaagcaaatcgcttccaacttaaaggtgcaccccttccgggtaaagctggcgatggatcaggcgaggcttttttctgaagaagagctgcggcgtattatagaaagactcgcagtgatggattatgaaatgaaaacggggaaaaaggacaagcagctcttgctggagctctttctccttgagcttctccggactgaatgaaaaaaacgatccccgttaaagggatcgtttttgtattatgcagaaagtccgttcacttgtttcgcaagtctagatttgtatcgagctgcggcatttttgtgtacaagacctgttttcactgctttatcaatgcgtttcgctgcttcagaaagagcagttttcgctttatccgcttcgttgttagcaacagaagcttcaacttgtttgattgcagtacgcatagcagatttgattgtcgcgttatgagcgcggcgttcgttgtttgtttttgtacgtttaatcgctgatttaatgtttggcatgtgtttcacctcctaagatacaacctgtagcacagtgtcttaaggttaaatcttcttcacaatagaacaaattgtattctatcaaacagaactttagattgcaatataaatgtaaagtatttttcgttgatgggtaaattcgcatgattcgttttgtaaatggccacactatgtaccacgatgattgaaggaggtcttccccgtgaaaaacaacgaactggatgtcaatcaatttctgatacggacggatttagcggtagaaacgaaacaggcggtaaaagacggacaagccggtcagaaaaaagaaataaacgggtttattgaaaaagaacgcgacaagggcggcattaaagtcagaaccgtcgatattaccaaagaaggcgccgagctatcggggaaaaagcagggacgctatgtcacgatcgaagctcaaggggttcgggaacacgactctgacatgcaggaaaaagtaacggaagtgtttgccgaggaattttccgcctatttgtctgcattaaagattccaaaggatgcaagctgtttgatcgtcggtctgggcaactggaatgtgacgccggatgcgctcggccctctcgtgaccgaaaacctacttgtgacaaggcatctgttcaggcttcagcctgaaaatgtgcaggaagggtacaggccggtcagcgcgcttgctcccggtgtgatgggattaacgggaattgaaacgagcgatattattcaaggtgtcatcaaagaatcaaagccggattttgtgatcgcggtagacgctcttgcggcaagagccgttgaaagggtgaacacgaccatccaattttctgatacgggcattcacccgggatcaggcgtcggcaataagagaaaagaattaagcaaggaaacgctcggcattcccgtcatcgcaatcggggtaccgactgtcgttgatgcggttacgatcgcaagcgatacggtggattatatattaaaacatttcggcagagagatgaaagatgacagcccgtcaagatctctggtgcccgccggaatgaacttcggcaaaaagaaggtgctgacagacgaagaccttcccggagaaaaagaacgccaatcctttctcggtattgtcggcacgctggacgaaaacgaaaagcgccagctgattcacgaagtgctttctccgctcggccataatctgatggtcacgccgaaggagattgacacctttattgatgatatggcgaacgtacttgcaaacgggttaaacaccgcccttcatgaaaaagtgtcacaagataacaaaggttcttataatcattaaagtggttctacctcctctagcttgttcatagagtaattactagacaagcgctggagggattcaaatcatgagaaaaaaacgcagaaaccgtcaaattgtcgttgcagtaaacggtggaaatgcgctcaagggcatgtttttgtttatgacaagccttatcgttattttcgtattatcgggtgtgctcacatcgcttcgccctgaactgaggctttcttcggattctcttcacggaattgccggagaacttccgggtgacgcgtttgcacacctcctcggcatggaaaatcattatttcgcctcagagcttcctgaaaaagactcttttcagctgtcccggctttccttaaaactggcgacaagcattaatatggaagacccgcggagtttcttgggacgtgagctgccgggatttgcccaatatgatacggagatccttctggcggggcaggggacggattatacgaatatgccggctgaatctccgccgccgtcaaaagtgatggaaaaagaaaaagaagtgaacctggcagaaatcgaaaacaaaacgaaaaaagaagaaacggcgccgccgaaacattcaacaggcagcaaaaaagtcgtctttatttaccacactcataataccgaatcctaccttcctctgttaaagggggaaacaaatccggataacgcccgccattcgaaggccaatgtcacgcttgtcggagatatgttcggaaaagcgcttgaagcgcaaggtgtaggagcgaccgtagataaaaccgacattcaggcccgcctgaacaaagacggcttaaattatgcgcgaagctatgacgaatcaaggccggtcgtaaaaagcgcgctcaccaaaaataaaaacctgcaatataccatagacattcaccgggattcccgccgcaagaaaaatacgacagccgacatcaaaggaagaagctatgccagagtcgccatcgtcgtcggcaaaaaaagcgctaattttgaagaaaactataaactcgcaagtgaacttcataagctcatggagaaaaaataccccggcttaagcgtcggtgttttatctaaaggctctccgggagataatggagtgtacaaccaggatttaaacgaccggtcgcttctgctggaattcgggggcgtggataacaatcttgaagaactgaggcgcgcatcagatgccgtggccgatgtgttcagcgaactgtactgggatgcagaaaaggtcagttcgcaatcaggagagaagaaaaaacaatagaaatcaggtgattcgaatgatccgttttaccggcaaatgcctgctgatcgccattgtcatgtttttcggcgtattgttcggcatgcagcaggcaaacagcggaatgcttgatatgaaaggatacaaagatccctccttaaaaggagcgttcacgctcggcggcggagaaggacaggaaaaagaagcttccattttggggcaaaccgttacggcgaaagatctggaagaaaaacaaaaacagctggaacaggcggaaaccttcaacttgttttcaaaagccggggaaaccctttcaaataccgtgacggactcggcgcaggcgatgtatgagtgggtttcgaaactgaaccgttagcattgatgaagagaaaagcggatgattccttaaaggaagcttttctctttcttgttttaattgaatgtttacaatcctattgatataatctaagctagtgtattttgcgtttaatagtaggagtgatagattgtgacagataaagaaaagcgtttagagaggcagtcaagaatccggaatttctccatcatcgcccacatagaccacggcaaatcgaccttggcggatcggattttagaaaaaacatcggcgatcacccagcgggaaatgaaagaacaattgcttgattcaatggaccttgaacgcgaacggggaattaccatcaaattaaattccgttcagctgaaatataaagcaaaagacggagaagaatatatattccatctcatcgacacgcccggacacgtcgactttacatatgaagtatcgcgaagcctggctgcctgtgaaggcgcgattctcgttgttgatgcggctcagggaatagaagcgcagacattggcgaacgtctatctggcgcttgataatgatcttgagattcttcctgtcattaataaaatcgatcttccgagcgcagagccagaacgtgtgcgtcaagaggttgaggacgttatcggccttgacgcttcagacgccgtcctcgcttcagcgaaagcgggcatcggcatcgaagacattttagaacagatcgtagaaaaagtgccggctcccgcgggagacccggaagctccgctgaaagcgctcatctttgactcgctttatgacgcgtaccgcggagtcgtcgcgtatatcagagtcgtagaaggaacggtcaaaccgggccagaaaattaaaatgatggcaaccggaaaagagtttgaagtgacagaagtcggtgtgttcacgccgaaagcaactccgacagatgaactgactgtcggcgatgtaggctttttaactgctgcgattaaaaatgtcggtgacacacgcgtcggtgacacgataacaagcgcggccaatcaggctgccgaagcattgcctggatatcgcaagctgaacccgatggtgtattgcggtttgtatccgatcgatacggccaaatacaacgatttaagggaagctcttgagaaacttgaactgaatgactcatcgcttcaatatgaagcagagacatcccaagcgctcggattcggtttccgctgcggatttttaggtatgcttcacatggaaatcatccaggagcggattgagcgtgagtttaaaatcgacctgatcacaacggcaccgagtgttatctatgatgtgtatatgacagacggcgaaaaggttgttgtcgacaacccgtccaacatgcctgacccacaaaagatcgaaagaatcgaggagccgtatgtaaaagcgacaatgatggtgccgaacgattatgtcggtgcggtgatggagctttgccaaggaaaacgcggcaattttatcgacatgcaatatttagacgcaaatcgtgtcagcattgtctatgacatgccattagcggaaatcgtctatgagttttttgatcagctgaaatcaagcacaaaaggctacgcgtcctttgattacgagctgatcggctacaaaccgtccaaacttgtcaagatggacattatgctgaacggagaaaaaatcgacgccctttcatttatcgtgcatcgcgattacgcgtacgaacgcggaaaagtaattgtggaaaaactgaaagagcttattccgcgccagcactttgaagtaccgattcaagcagcgatcggccagaaaatcgtggcccgctctaccattaaagcgatgcgtaaaaacgtattggctaaatgttacggcggagacatctcgcggaaacggaagcttcttgaaaaacaaaaagaaggaaaacgccggatgaagcaggtcggctcagtagaagtgccgcaggaagcgtttatggccgttcttaaaatggatgacagcccgaaaaaataacggaagccgccgcagtcccgcgctgcggcttctttctgtaaagaagaaggtgtttcaaaatgaaatcagcttatattcatattccgttttgtgagcatatctgccactattgcgatttcaataaatattttattcaaagccagcctgtcgatgagtacttaaactcactcgaaaaggaaatgataaatacaatagaacggacgggacggcctgatctccgtacgatttttatcgggggaggcacgccgacatcgctttcacccgtccagctggaaaaattgatggattccattcaccgcgtgctgaagccttctgacggactcatagaatttgccgcggaagcgaatccggatgatttgtccccggaaaaattaaaaattatgaaaaatgccggtgtcaaccggctgagcttcggtgttcaaacctttgaagatgagcttttacaaaaaatcggcagagtgcataaacaaaaggacgtattcacttcctttgaacgtgcgagggctctcggcttcgaaaacatcagtctcgatttgatgttcggcctgccggggcagacgctggccgatcttgacaattccgtcaaaacggctttatctcttgatgcggagcactattccgtttactcgctgatcgtagagccgaaaacggtgttttataatttaatgcaaaaaggccgcctgcatctcccggcgcaagaacaagaggccgagatgtatgaaacggtcatgaggcagatgagtgaagcgggcatccgtcaatacgagatcagtaactttgcaaagcccggatacgagtcgcagcataatctgacgtattggagcaatgaagagtatttcggttttggcgcaggcgctcacggatatatcagcgggacgcgcaccgtcaacgccgggcctgtgaaacattacatgcagctcatcgaagaaaaggcgctgccttaccgtgacacgcacaaggtgacacgtgaggagcagattgaagaagaaatgttcctcggtctcagaaaaatgtccggcgtacaaaagcaagcttttctcgataaattcggacgctcggtcgacgaactgtttcccgatgttctcaaagatttaaccgaaaaaggcctgatctgtgacgcggaagaatcggttgcattaacgcatgagggcaaattattaggaaatgaggtttttggtgcttttttgggtgagttataattgacatttttcttttggtttgttacttttgatatagaattagcactcgctgaccttgagtgctaacaggggtgatgatgatgttaacaaatcgtcagctgttgatcctgcaagtgatcattaatgattttatacaatcagcgcagcctgtaggatcaagaactctttcaaaaaaagacgagattacattcagctctgcaacgatcagaaacgagatggctgacttggaggaattgggctttattgaaaaaacccattcatcctcaggacggattccgtcggaaaaagggtacaggtattatgtcgatcatttgctgtcacccgtcaagctgacaaaaaccgatctggatttaattcactcgatatttaaagaaaaaatcttcgagctggaaaaaacagtccaaaaatcagcgcaaatcctgtccgatctgacaaactacacatcgattgtcctcgggccgacgctgagcgagaactatcttaaacagattcaaatcgttccgatccagccggataaggcggtcgccatcctcgtcacgaacacggggcatgtcgaaaaccgcaccatcaatttcccggctaaagtggatttggccgatattgaaaaactggtcaatatattaaacgatcgattagcgggcgtgccgatggacgaactgaatgagcgcattttcaaagaggttgtcacatatttaaggcagcatatcgccaactatgacagcatacttgaatcgctccgctccacattccatccggcggcccacgtcgagaaattgtttttcggcggaaagatcaacatgctgaatcagccggagttccatgatattgaaagggtccgctcgctcttatctttaattgaaaaagagcaggatgttctgaagctgtttcagtcatcaaaagccgggatttcaatcaaaatcgggaaagaaaacgactacgaagaaatggaaaactgcagtttaatcacggccacctatacagttgatacgaaacagatcggatcaatcgcgattatcgggccgacgcgcatgaattattcaagagtcgtcagcctgctgcagcacgtgacttcggacttgtcaaaagcattcacaagtttgtatgatgaataagggaattttggcaatcattttcagtcatctttttacagcatttgagggaggtgaacacaatgtcagaagaaaaacaaaccgcagaacaggttgaagcagcagaacaagaagaagtgacagaacaggcagaacaagccgcttcacaagagcagcatgaagaaacggcaggtcaggaagaagcccttcagcaccaaattgatgaattgcagggtttgcttgatgaaaaagaaaacaagcttttgcgtgttcaagcagactttgaaaactataaacgacgcagccgccttgaaatggaagctgctcagaaataccgttctcaaaacgtcgtaacggaaatccttccggctctcgacaactttgaacgggcgctacaggtagaagctgaaagcgagcagacaaaaagcttgctgcaaggtatggaaatggtccgccgccagctgatggacgcacttgaaaaagaaggcgtagaagccatcgaagctgtcggtcaggaatttgatccgaaccttcaccaagccgtcatgcaggtggaagatgaaaacttcggcagcaatattgttatcgaagaactgcaaaaaggctacaaactgaaggatcgcgtcatccgtccttcaatggtaaaagtgaatcaataactacatagcaggaggtaattcaaagtgagtaaagtaatcggaattgacttgggtacgacaaactcatgtgtggcagtgcttgaaggcggagagcctacagtcatcgccaacgctgaaggaaaccgtacgactccgtcagtcgttgcatttaaaaacggcgagcgccaagtaggggaagtggcgaaacgccaatcaatcacaaatcctaacacaatcatgtctgttaaacgccatatgggtactgactataaagtggaaattgaaggaaaagactacacgcctcaagaagtgtcagctattatccttcagcatctgaaagcatatgctgaaagctacctcggcgaaacagtttcaaaagccgttatcacggttcctgcatacttcaacgatgctgagcgccaagcgacaaaagatgccggtaaaatcgccggtcttgaagtagagcgtattatcaacgagccgactgcagcagcgcttgcatacggacttgataaaacggatgaagaccaaacaattcttgtttacgaccttggcggcggtacgtttgacgtatctgttcttgaacttggcgacggcgtgtttgaagtccgttcaactgccggtgacaaccgtcttggcggggacgactttgaccaagtcatcatcgatcatctcgtagcagaattcaaaaaagaaaacggcattgatctttcaaaagacaaaatggcgcttcagcgtttaaaagatgcggctgaaaaagcgaaaaaagatctttccggcgtatcatccacacaaatttctttaccgtttatcacggcgggagaagcaggtcctcttcaccttgagctgacactgacccgcgctaaattcgaagagctttccgctcaccttgttgagcgcacaatggctcctgtccgtcaggctcttcaagatgcggatctttctgcaagcgaaatcgataaagttatccttgtcggcggatcaacacgtattcctgccgtacaggaagcaatcaaaaaagaaacgggtaaagaagcgcataaaggcgtaaaccctgatgaagttgtagcgctgggtgcagcgattcaaggcggcgtcatcactggagacgtaaaagacgttgttcttcttgacgttacaccgctttctctcggtattgaaacaatgggcggcgtgttcacgaaactgatcgaccgcaacacgacaattccgacgagcaagtctcaagtattctcaaccgctgctgacaaccaaacagctgttgatatccatgttcttcaaggtgagcgcccgatgtctgccgacaacaaaacgctcggccgcttccagcttactgatatcccgcctgcaccgcgcggcgtaccgcaaatcgaagtttctttcgatattgacaaaaacggtatcgtaaacgtaagagcgaaagacttaggcacaggaaaagaacaaaatattacaatcaaatcttcttcaggtctttctgatgatgagatcgaacgcatggtaaaagaagcggaagaaaacgctgacgctgatgcgaagagaaaagaagaaatcgaagtccgcaacgaagctgaccagcttgtgttccaaacggaaaaaacattaaaagatctggaaggcaaagtggacgaagagcaagtgaaaaaagcaaacgacgcgaaagacgcgctgaaagccgctatcgagaaaaacgaaattgaagacatcaaagcgaaaaaagatgaacttcaaacaatcgttcaagagctttctatgaagctttacgaagaagcggcgaaagcgcagcaggctgaaggcggagcaaacgctgaaggcaaaaaagcggacgacaacgttgtcgatgcggaatacgaagaagtaaaagacgacgaaacgaaaaaataagttctttcccgcataggctataggcggaagaacacacagcatattctgattcaacagacagaaagtcaaagtcaggcatctcttggctttgactttttttcttgcccgggataaaaggaattgaaaaaacataattcaaaatgatacaatctaatttatgtgagaaattcgggagagtgaagcgagatgagtaagcgtgattactatgaagtgcttggggtaagtaagagcgcttcaaaggatgaaatcaaaaaagcctatcggaagctttcaaaaaaatatcatcctgatatcaataaagaatccggagcagatgaaaaattcaaagaggtaaaagaagcgtacgaagcgctctcagacgaccaaaaacgcgctcaatatgaccaattcggccatacagaccctaaccagggattcggcggcggtttcggaggcggcggagacttcggcggcttcggtttcgatgacatcttctcaagcatcttcggaggcggcacgagacgccgtgacccgaatgcgccgcggcaaggcgcggatctgcagtatacaatgaccctgtcatttgaagacgcggctttcggaaaagaaacgatcattgaaattccgcgcgaagagaattgcgaaacatgtaaagggtctggcgcgaagccgggaacaaagccggatacgtgctcgcactgcggaggttcaggccagctgaacgtcgaacagaacacgccgtttggcaaagtggttaaccgaagagtctgccaccactgtgaaggaacaggaaaaatcatcaaaaacaagtgttctgactgcggcggcacgggcaaagtgaaaaaacggaaaaaaatcaatgtcacgattcctgccggtgtggatgacggacagcagctgcgcgttccgggccaaggtgaaccgggcgtgaacggagggcctgcgggagatctgtttgtcgtattccatgtgcgcgcccacgagttctttgagcgcgacggagacgatatttattgcgaaatgccgttaacgtttgcccaagcggcactcggagacgaagtggaagtgccgacgcttcacggaaaagtgaaattgaaaatacctgccggcacacaaacaggcacgaaattcagattaagaggcaaaggcgttcagaacgtccggggctacggacaaggcgaccagcacattgtcgtccgcgtcgtcacaccgacgaatctgacagacaaacaaaaagacatcatccgcgagttcgctgaagtcagcggaaacctgccggatgaacaagaaatgagtttctttgacaaagtaaaacgcgcatttaaaggcgagtaatgattggataggagttggtagttttgaaatggtccgaaatcagcattcacacaacacatgaagcggtcgaacccatctcaaatattttgcatgaagctggtgcgagcggggttgtcatcgaagatccgcttgatttaatgaaagagcgtgagaatgtttacggggaaatctaccagctcgaccccaatgattaccccgatgagggtgtcattgtcaaagcgtatctgccgatcaacagtttcctcggcgaaacggtggacggcattaaagagacgattaataatctgcttttgtacgacattgatttgggcagaaacaaaatcaccatttctgaagtgaatgaagaagaatgggcaacagcttggaaaaagtattatcatcctgtgaaaatttctgaaaagttcacgatcgttcccacatgggaaacgtacacacctgttcatacagatgaactgattatcgaaatggacccgggtatggcattcggtaccggaacgcatccgacaacagttctgtgcattcaggcgcttgaacgtatcgttcaaaaaggcgaccgtatcattgatgtcggcaccggttcaggaattttaagcatcgcggccgccatgcttgaggccgaatcggttcatgcgtatgaccttgatccggtcgctgttgaaagcgcgcgtctgaatgtgaaattgaacaaagtgagtgatacggccgaagtgaagcagaacaatttgttagacggcatcacgggcgaacatgatgtcattgtcgcaaatattttggcagaagtgattctccgctttacatcacaggcgtacgacctgctcaaagacggaggccattttatcacttcaggcattatcggccagaaaaaacaggaagtaaaagaagcgttggaaaaagccggctttactatcatagaaattctgtctatggaagattgggtcagcatcatcgcgaaaaaataacagttagtaggtgtcacagcgtatgcaacgatattttatcgagctcacgaagcaggagatggacgaaactcctgattttcaaatcacgggggaagacatccaccatatagcgaacgtcatgagaatgagtgcgggagaccggattatctgctgttcgaaagacggccatgaagcgttttgcctgcttaaagaggtttctaaagatcatatatcatgcagcattgctgagtggacgggtgaaaaccgtgaactgcctttgaagatcaggatcgcaagcggccttccgaaaggtgataagcttgaatggattatccaaaaagggaccgagctgggggcaagtatgttcatcccttttcaaggcgccagatccgttgttaagctagacgacaaaaaggcaaagaaaaaacgggagagatgggcgaaaatcgcgaaggaagcggcggagcaatcgtaccgcaatgaaattcccgaagtgaaaaccgttcatacgttccggcagctgcttgaaatggcggagaatgtcgataaatgtgtcgttgcatacgaggagtcatcaaagcagggagaaacgggcgctttcgccgcggagctcaaaagccttccgcaaggttcgtctcttttaatcgtattcggccctgaaggcggtctgactgagtctgaagttcatcagctttcagaaaaaggcgccgtcttatgcggcctcggaccgagaattttacggactgaaactgcgcctctttacgcgttaagcgcagtttcctatcatacagagttattaagaggtgatcagtaatggcaactgttgcttttcatacccttggctgcaaggtcaaccattatgaaacagaagcaatctggcagctgtttaaagatgcgggttatgaacgaaaagaattcgaacagacagcagatgtatatgtcattaatacatgtacggtaacaaacacgggagataaaaaaagccgtcaagtcatcagacgggcgatccgccaaaatcctgacggcgtcatctgcgtaacagggtgctatgcgcaaacctctccggcagaaataatggccatcccgggtgttgacatcgtcgtcggcacgcaggatcgtgaaaaaatgctcggttacattgagcagtacagggaagagcgccagccgatcaacggcgtcggcaatattatgaaagcacgcgtgtttgaagagctggatgttcccgcttttactgaccgcacaagagcgtcgttaaaaatccaagagggctgcaacaacttctgtacgttctgcattatcccttgggcgcgcggcctgcttcgttcccgcgatccggaagaagtcattaaacaggcgcagcagctggtggatgccggctataaagaaatcgtcctgacggggattcatacgggcggctacggcgaagatatgaaagattataatttcgccaagcttctccgcgagcttgatacacgtgtagaaggattgaagcggatcagaatttcatctattgaagcaagccaaatcactgatgaagtaattgaagtgctggatgcgtctgataaaatcgtccgtcaccttcatatcccgattcagtcaggatcaaacaccgttctgaaacggatgagacgcaaatatacgatggaatttttcgcggaccgtttaaataagctgaaagaagcgctgccgggtctagccgtcacatctgatgtcatcgtcggtttcccgggtgaaacggaagaagaatttatggaaacataccggttcattaaagaacataagttttcagagcttcacgtattcccttacagcaaacgcaccggaacacctgcggccagaatggaagaccaggttgacgagaacgtgaaaaacgaacgggtgcataagctgatcgcgctgtctgaccagcttgcaaaagaatacgcctccgattatgaaggagaggttctggaaatcattcctgaagagacgtttaaagagtctgatgaagacggcatgttcgtcggctatacggacaattacatgaaagtcgtcttcaaaggcacggaagatctaatcggcaaacttgtcaaagtcaaaattcaaaaagcgggctatccgtacaatgaaggacaattcgtccgcgtcgttgaggatgaaatgacccgaaacatgcgcatgtcttcataacatatgtaaaaaaaccggtgccttcccgcatcggtttttttacggtttcggaggaatcagcctgtcaatcagccggtaaaacaaatgtgtgaacggcagaaacaatagggcggtgactacgttaaataacaggctgaaatgcgcaatcatctgcgcgggatcatcagacaggcgctccgtaaaacctgctgatgcggacaggaagggaaatacgagcagcacgccgagaatattaaacacaacgtgagcaccggcggtctgtctggcggcataaccgcctgaaacagcagccatgacggccgtgacgcatgtcccgatattagatcccagaacgacgctgaccgcttgttcaatgccgatcaccccttcgttcataaaactcatcaaaatgccgatgcagacggagcttgaatgaatgattgccgtcaatatcataccgataaaaagagcggaccagctcgaatcattcacatgtcgcaaaacctccgcccccgccttcatttctgtcagcggaacggcgagccggctgaagcatgtgatgcaaaaaaagatgatgccgagaccgaggaagcttatgccgatctgcctgaacggatatttacggaggaggataaacacaaggcctccgataaaaagcacccaaatgagcacatccatctttatggctaaaaactccgtcgtaaacgtggagccgacattcgtgccgagaatcatcggaatggtccgtttaaaagataaagcgcctgcgctgacaaagccgatgacaatgaccatgaaggctgagctgctctgaagaaaaccagtgaacacgatgcttatgagaaaagctttcaaagggtggtcggtaaataagagcaggcttttctcaatttttgaatacgttaatgcgatcagcccctgcctgagcaggctcattccgagtaaaaaaaccaggataagtgcggtaaagagaatcagtatcatcaaacgaaacacccctttccatcattatatagacaagcagccttattcatgacggaaaagtgagctcgcttagttgacctgactgatggcttatattataatgtcaaagtacatgtttatatatgtatctttttaaaggtagtcgattggtgtattcggagggagggaaagagaatgtcaaaaacggtcgttagaaaaaacgaatcgcttgaagatgctcttcgtcgcttcaaacgcagtgtatcaaagacaggtactttgcaagaagcaagaaagcgcgaattttatgaaaaacctagcgtaaagcgcaagaaaaagtcagaagctgctagaaaacgcaaattctaaaagagggtggatttatgagtcttcttgagcgacttaaccaagatatgaagctgtatatgaaaagccgtgagaaagacaaactgactgtcgttcgaatggtgaaagcttcacttcaaaacgaagcaattaagcttaagaaagacagtttgaccgaggatgaggaacttactgtcctatctcgtgaacttaagcaacgtaaagactccctccatgaattttcaaacgctaatcgtttagatttagtagataaagttcaaaaagagctggacattttagaagtttatttaccgaagcagctttctgaagaagagctgcagacaatcgtaaatgaaaccatcgctgaagtcggtgcgagctccaaagcggacatgggcaaagtgatgagtgctattatgcctaaagtaaaaggtaaagctgacggcagcgtaattaacagactcgtcagcagtcaattatcttaattgacaagaaaaaagacatctttccttgagagatgtctttttttatacataaaaaaatgaaactaaagtacatttgttacgtatataaagaagaacgaaacgggaaggagggtatatttgccttgttccgaaaaaaaaccggaattgctgttgctctattgggcttatttgtattatctttattaggggttcaattgaacgtgaaagctgatcacccatcggtttatgtcatcccggttgagaaaaatgtcgaacaggggctcgcctcgtttttatcgcgttctttcaaagaagcgaaggagtccggcgcgtcacacattattcttgacatcaatacaccgggaggcgccgttcaatcagccttggatattgcggatatcatcggccgcgcggatgtgcctgttaccgcttacgttaataaacgggcgctttctgccggagcgtatatagcgcttcaggcagatgaaatctacatggcgccgggcggaaaaatgggtgccgcagccatcatcgacggaaaaggaaacgcggcggacaaaaaggcccaatcactgtggcatgcagaaatggaggacgcagcggttaaaaacaaccgaaatccgaaatacgccctggccatggcagatcccgccattaatgcaaaggaagcgggcgccccaaagggaaaactgctgacactgacagctgaaaaagccaaggaagtcggatattcggagggcacggtttcaaaccttgatgctctatatacaaagctcggttttgacaaagcggatgttcaccatgcagaagaaggtttcgtcggcaaactgggccgatggctgacaaatccgtttgttgtccccgtcttattaacgcttgctttgcttggtttgaccattgaattgttctcgccgggcctcgggataccgggtgccgtcggactgacggccatgctgctgtttttcaccgggcatatcgctgccggattcgccggctatgacagcgtattcttattttgcgcgggcttcgtttttatccttttagagatattcctgcccggaggcataatcggtcttatcggtattgcaggcgtcatcgcgagcctctttctcgctgcgggtagctttaccgtaatggcggtttctctcttgatcgccattgctgtgtctattacagcctttatcatattaacaagggtgttggggaaacgaatgaaattctttaaaaaattaatattaactgattcaacaagcacggagagcggttatgtttcaaatcagaaccggacggagctgttgggaaaagtcggcgttaccgctacagccctcagaccgtcaggcaccgtcattattgatgatgaacgtctggatgtcgtctcggaaggatcattcactgaaaaagacagacaggtgaaagtagtgaaagcggaaggctcacgcattgtcgtgagagaaatatagatgataaccttgaggaggaattagatggaactgtcaagtttggcgattttagcattagttgctgctgccattattgtgttagccatattcttcacctttgtaccggtgatgctatggatttcggcgcttgcggcaggagtcagaatcagcattttcactttggtcgggatgaggctgcggcgcgtcataccaagccgcgttgtcaatccgttaattaaagcgcacaaagccggcctatccgcaacaacaaatcagctcgaaagccattatctggccggaggtaatgtcgacagggtggtcaatgccctgattgcggcacagcgcgccaatattgagctgacatttgaacgctgcgcagccattgacctggccgggcgtgatgtattggaagccgtacagatgagcgtcaatccgaaggtcattgaaacaccgtttatcgcgggtgtcgccatggacggaattgaagtaaaagcaaaagccagaatcacggtaagagccaatattgagcgccttgtcggaggagcgggagaagagacggttgtcgcccgtgtcggagaagggattgtctcgacaatcggttcttcacacaatcataaaaaagtacttgaaaaccctgatatgatttcgcagaccgtacttggcaaagggctggattcaggcactgcatttgaaattctttcgattgacatcgccgacgttgatatcggcaaaaacatcggagcgattcttcagacggatcaggcagaagcagacaaaaacattgcgcaggccaaagcggaagagcgccgcgccatggcggtcgcccaagagcaggaaatgcgcgctcgcgtagaagaaatgcgtgcgaaagtcgtggaagcagaagccgaagtgccgcttgcgatggcagaagcgttgcgtgaaggaaacatcggcgtcatggactatatgaacataaaaaatatcgacgcggatacggacatgagggattctatcggcaagctgacgaatgaccagcaagatgaagaccaacaataacctctctattaaggagggagccgctatatgcacgagattctgacaaatccgctcgtcattgccgccgtcatcggcattatatcggcaatattcggcaagaaaaacaaagatgaaaaatgtccgccgggtacacgtcccggaaatcaggcaaaaaagcaggatcaaaaacagccgcagaaagagcataagccggaagcggaagaattgcctgccgtttcagaagagaacccttttgagcaaaaaagaagggaagctgaacagcgcctttcggagacggagcagatgtttaacgggcttgaacataagctgacatccccacgcgcacgaaacgcgtctctgaagaaatcagccctcaaaataaataaagaaactgcggtccaaggcattatattcagtgaggttttggggccgccccgtgcaaaaaaaccgcaccggaccatgcggaacatcggtaaaaaataaagtgttagaaccccttttcaaatcatacatatgagatgaaagggggttctttttttatggggcaaagaaagaatcgtgtaaaggcatggctgacaagagcattggaaattcccccggacgttatgatggatctgcctcgtattacgatggtcggcagacttcatatctacatagagaatcacagaggcctcctgctgttcagcgaagaagaagtcaggctgatgctcaagcaggggcagtgtatcatatcaggaaaaaacttggtcattaaggcaatccttcctgaggaaatccttttggaaggcacgatagatcacgtacgatatgtcgattcataaagccggggggaaataatgtgaaaaacaaatggctgtcatttttttcgggtaaagtccaaatggaagtcaaaggaaaaggaattgaacggctgctgaatgaatgcacgagaaacggaatcgccatctttgcggtgaaaaaaaagcaagactgtgttctgctgatgattcagcttcaagatgtacatgctttcagaagagtcatcagaaaacatgaatgcaaagcaagctttacaaaaagaaagggtcttccctttctgcttctcaaatcaaaattaaatctgggtttcactgcgggatttgtgatattttttgttatattgtttcttttgtccaacatgatttgggaaattgatattaaaggggccaagccagagaccgagcatcagatggtaaagcaccttgaagaaatcggtgtaaaaaaaggccgtttgcaatttttaatgatgacgccggagaaaattcaaaaatcattaacaaacggtatcgataatattacgtgggtcggtgtggaattgaacgggacagcccttcatatgaaagtggtcgaaaaaaacgaaccgacaaaagaaaagtacgtgagcccccgccatatcgttgccaaaaagaaggcggtcatcaaaaggatgttcgtgcaaaaggggcagccgatggcttttgtgaacgatcatgttgacaaaggacagctcctcgtctcaggactgatcggaaatgaagaccggaaagttgcctcaaaagcggaaatttacggagaaacatggtacaagtcagaagtaaccgtgcctcttgaaacatcatttacgctatatacgggtaaagtaaggacgaagcacaagctgtctttcggatcatggggcgtgcctttttggggctttgaatttaatgagaagccgctgaaacatccgaaaacagaggaagaaaagcatccgtttcaatttctggggatgaagcttccggtttcttacgttcaagaacagacaagagaaagtgaaacatccgtgcggacttatacgaaaggcgaagcggttcaggccggtatcaaaatgggaagacaagatgtagaaaagcgattaaacggcagcggagaggtggaaagtgaaaaagttttgcaccaatccgttgagaatggtaaagtaaagttgattattctctaccaagttatagaagatatcgttcaaaccacacctattgttcagggagactaaagaatggcagaacatttacttgcgattaatcacaaactgaaaagcccggacgaagcactttctttgttcggcagccaagatgcttttttacatttaatggagaaggatctgggcattagcctcatcacacgcggtgaaaccatttacgtttccgggaatgatgaaacatttgagatcgctgacagattattgggctcgctccttactttaattcgcaaggggatcgagatttcggaacgtgatgtgctgtatgccgtgaaaatggcaaaaaaagatgaactggactattttgaaagcatgtatgaagaggaaataacgaaaacggctaaaggcaaaccgatccgtgtcaaaaccatcggccaaagagaatatgtggcggcgatgaagaaaaacgacatggtgttcggcatcgggccggcgggaaccggcaaaacttatttggcggtcgtaaaagcggtgcacgctttaaaaaacggccacattaaaaaaatcattttaacaagacccgctgtggaagccggcgagagcctcggctttctgcccggagatttaaaggaaaaagtagatccttatctgcgcccgctgtatgacgcgctccatgatgtgctcggaagcgaccatacggagcgtcttatggaaagaggggttatcgaaatcgccccgcttgcctatatgagagggcggacgcttgacgacgcgtatgtgattcttgatgaagcccagaataccactcccgctcaaatgaaaatgtttttgacgagattgggttttggctctaaaatgatcattacgggcgacgtaagccaaattgacctgccgaaaggcgtcacatcgggacttgcagtagcgaaggacatgctgaaggacgtaaacggcatctccgtgattgaacttgaccagacagatgtggtcaggcatccgcttgttgcaaaaattattgaagcttatgataagcaaaagtaatgcaaaaatgacccgatctcccgttatcgggtcatttttatatgatgtgttcctgatgtttcagggaggaggttcttgttttgaaaaagaagggaaagggcaaaagcgcccgggaacggttccgcagtttcagacatgcccgctcagcccatgtgctgctgtacctgctgctttcagcgatcatgtttggtttgctctttattcatgtaaaacctgaatcacttaatttggatttgtttgcagtcagtgataagacgatttacgcgcccgccacagtggaagatcagcaggcgacggaatcgaaaaagcaggcggccgaagatgcggtggaagaccaatacactctgaaaaaaggctataccgacaaccggcttgacctgatcacttccatttttgacagcatcggcgaagtgaaaaaagatgcggaaaaagacaaaaagtcaccttcggaaaaatcactggtaaaatcggtgaaaaacaagctgacacaggatgtcaatgaatccgtctcggaagatgccattaaatcgcttctccatgcaaacaatgaagatttctcatttgtgagggattccgtcattaccgcggtgaatacggtgatgagcagtgaaattccttctgaaaagcttgctgaagcgaaggataaggtcgcaaaagagctgaaaagcgcttctgtgccgtcaaaatatttagcggctgcgactgaaatcggaaaatacgcggtcatcccgaattacgtatttgatccgaaagcgaccgatgagaaacgccaggaagcgtcagacagcgtccagccggtacagatcaaacagggacaggttctcgtggaagagaatgatctgatcgaccgggaagtatacaggaagcttgaactgacgggtcttttgaataattccaacctgttaaaaccgatcagcggtctgcttctgatgatcggtctgtttatcgccacgcttgtctactattttgagaaacagcagcaggagcttaagctgaaaaataaatctcttttgctgttttctatcattacaacgcttattctcgtcattatggaagtcgtcagtctctttcagaagattgaatacaccaatatcggctatcttgtgccgatcgccgccggcgcgattttaatcaggctgctgctcaatgaaaggctcgccattttaggaagcatcattctggcgatctgcggcagtatgatgtttaatcagggtgtgacgggaacatttaattacgtcatcggcatttactatttaatcagcagcatttcaggcattctgtttttgggaaaacataatgcgagatcaaaaatattgcagacgggactgttcgtctcatttattaatatgattatcgtgctgtcgcttttattaatacaaaatacggcgctgtcaccggttgaaatcggaacgctgatgctgatgggggtcgtctcgggacttgcttcatccgttttgattatcggtctgatgccgttttttgagacgggattcggcattctttcaacgatgagactgattgaactgtctaatccgaatcatcccctgcttcgaaagattttaacggaaacacccggtacatatcatcacagcgtcatggtggcaaatctatcggaagcggcttgtgaagccgtaggggcaaacggtcttttagcacgggtcggagcgtattatcacgatctcggcaaaacgaaacgtccgcaatattttattgaaaatcagatgaatatggataatccgcatgacaagctgtctccgcagctcagcaaaaatatcattatcgcacatacgacagacggtgcgaatatgctcagaagctataagtttccgaaagagcttgtggatatcgcggagcagcatcacggaacgtcccttttgaaattcttttattataaagcgaaagaaaagggcgaccagattacagagaaagagttccgctacccggggccgaagccgcaatcgaaagaagcggctattatctcagtggccgacagcgttgaagccgccgtccgttccatgcataaccccaatcccgagcggatcgaaaaactggtgcggggaattatatccgacaagcttcaggacggacaattctcagaatgtgatctcacgttccgagaactggatacgatcgcaaaaacactatgtgcgactttaaaaggaattttccactcccggattgaatatccggaggctacgaagaaggtgaaataaatgggtttactcatagatattattgatgaaacgaacagcgtctcagctgatgcgctccaagaagtggagaagctgctccaattcgcggcggaaaaagaaggcgttcaggatcaggctgaagtatcggtcacgattgtgacaaatgaggaaatcagagaaatcaacagagactaccggggaaaagacactccgactgacgtcatttcgtttgcgcttgaagaagaaggcgaagacgaggttgaaatcgtaggcgccgacatgccgcctgttttaggagatattatcatcagcgctgacagaacgaaagagcaggcggaagagtacggccattcatttatgagagagctcggttttctggccgtccacggctttttgcatttgcttggctatgatcacatgacaaaagaagaagaggaagaaatgttttcaaagcaaaaggatttgctggatgagtatggactcacgagatcataaaaacgagtggagcaggttcctgaagagctttgtccatgcatggaggggaatctggaaaacggcgcggtcagagcggaattttcaatttcatattaccgcggcctgcgccgttatcgtttgcggttttctcaccgggctgagcacagccgaatgggccgttgttttgatgctgatcggagggatgcttgctttggagcttttaaatacggcgatagagcatgttgtggatttagttaccgatcagtatcacccgctcgcaaaagcggcaaaggacgcggccgccggagccgtttgcgtctttgccgtaatatcgtgtatcattggtttactcatcttcttgccgaagatatgttagcagaagattcttacaattattttacattgccaaaaatgggcgtgaaaaaccaatcataattatgtaaaataaaagtgacagcggtatcatacaggataaaggtaagagaggaattaagtacacatgaacagacaagaattgattgcagaagcattaaaagcgcgggacacagcgtatgtgccgtattcaaatttcagagtgggagccgctcttcttaccaaagacggaaaagtgtacagaggctgcaacattgaaaatgcggcatacagcatgtgcaactgtgctgaacgcacggcgatattcaaagctgtttccgagggggatacggaatttgcgatgctcgccgtggctgcggatactccgggaccggtttcgccgtgcggagcctgcaggcaagtaatttccgagctgtgctcaaaggatatgcttgttattctgaccaacttacaaggacaaataaaagaaatgactgcggaagaattattgccgggcgcattttcatcggaggatttacatgacgaacgaaagctttaaatcaggatttgtatctatcatcggaagaccgaacgtaggaaagtctacctttttaaacagggtcatcggtcaaaagatcgccatcatgagcgacaaaccccagacgacaagaaataaagtccaaggagtgctgacaaccggcacgtcgcagaccatttttattgatacaccgggcattcacaaaccaaagcacaagcttggcgactttatgatgaaagtggcgcagaatacgctgaaagaagttgacttggtgttatttatgattaacgccgaagaagggtacggaaaaggcgacgagtttatcattgaaaagctcggacagacgtccacgccggtctttctgatcgtaaacaaaattgataagatccaccctgaccagctgcttctgttaattgatgagtaccgtacgcgctatccgtttaaggaaatcgtgccgatctcagctttggaagggaacaacgtcgaaacccttctcgcgcagattgaagcgtatttaccggaagggcctcagttctatccgagcgatcaggtgactgaccatcccgagcggttcattatttctgaactgatcagggaaaaggtgctccatctgacaagggaagaagtgccgcacagcatcgctgtcgccatcgagtccattaaagggcaggaaaacggctccgtccatgtcgccgccaccattgtggtcgagcgggattctcaaaaaggcattgtcatcggcaaaaaaggagcgcttctgaaagaagtcggcaaaagagcgcgggctgatattgaagctcttttgggctcacgcgtttacctggaattatgggtgaaggtgcagaaggactggcggaataaaatgtctcagctgcgtgatttcggctttaaagaggatgaatattaattcatctaaggcgcatgcctgaggtgtgagattacctcacagaagcagggattcgttagcaaaatttgtttaacatgaaaaggaggacatcaggtcaagataagggtaagaatttggattgcaaagctagtttaatgatgaaaggtgggttttttgtgttgaattttacctggaacgtattttctcaaacaggaagtgttgatacgtaccttctttttaaagaactggaaaaagagaacctggaaagacccgaagaaccggaagatgagctagcccgaattgattttccaattttgtaaacctcttggcccctcccgttgttggaaggtgcggaaatgctgactaaatgtgaaggaatcgtgctccgtacgaatgactacggggagacgaataaaatcgtgacattgctgacgagggaacacggcaaaatcggcgtcatggcaaggggcgccaggaagtcagccagccggctgtcagcagtcagccagccgtttttgtacgggtcatttttaatgcaaagaacatccggactcggcacgctccagcagggtgaaatgattctcagcatgagaacgatcagagaagatttatttttgacggcgtatgccgcttttatcgctgaactcactgacaaaggaacggaagagaagaaaccgaacccctatttattcgaattgattctcgaatcctttaagaggctgaatgacgggactgacccggacgtgatcaccttcatcgtgcagatgaaaatgctcggcgtcatggggctgtatccggagctgaatcattgtgtccactgcaaaagcggggaagggacgtttcatttttcgataagagataacgggtttatctgccaccgctgctttgaaaaggatccgtacagagttccgatttcgccgcaaacggcaaggctgctaaggcttttttattactttgatatcggaaggctcggcagcgtctcgttaaaacaggaaaccaaaaacgaaattaaacgggtcattgatctgtattacgaggaatattcaggactttatttaaagtcaaaacggtttttagatcagatggaaagcatgaagaaccttttggatgaaaacaaaagttgacattctgcccatctttttatatgatcatttattataaaatatgttgcagtgacagaaagaagtacttgcgtccaactcatacaagcgaccttagggcagtgtaagctaaggatgagcgcgcaacgaaaggcattctcgagcaaccctttaaaaagaggctgagtgattcacatcctcagcaactagggtggaaccgcgggagaactctcgtccctatgtttgcggccggcaagcatagagacgggagttttttggttgccgccgcacttgtaaaagaatggagaaagtggaggtgcttgaaatgaacattcaagatatgattttaaccttgcagaagcactggtcgaatgaaggctgtgtgctcatgcagtcgtatgatgtggagaaaggcgcaggcacaatgagcccgtatacatttttacgaagcatcgggccggaaccgtggagagtggcttacgttgagccgtccagacggcctgcggacggacggtacggtgaaaacccgaacaggctctatcagcatcaccaattccaagtcattatcaagccgtcgcctgataacattcaagagctttaccttgattcattgcgtgcgctcggcattgacccgcttgaacatgatatccgtttcgtagaagacaactgggaaaacccgtctttaggctgtgcaggtctcggctgggaagtatggcttgacgggatggaaattactcagtttacatacttccagcaggtgggcggaattgaatgtaaaccggtatccgttgagatcacatatggtattgaacgtctcgcgtcatatattcaggataaagaaaacgtctttgatcttgaatggacgtcaggatttactgtgaaagatttatttatgatggctgaatatgagcattccgtttatacttttgaaacatctgacgtggatatgcttttccatttgttcagcacctatgaaaaagaagcgatcagacaaatggataacgggctcgtgcatccggcctatgattatgtgctgaaatgctctcacacatttaatctgctcgatgcaaaaggcgcgatctcggtgacagagcggacgggttatatcggccgtgtccgcaacttagcgagaaaagtggcaaaaacgtattatgaagaacgggaaaaattagggttcccaatgcttaaagaggagggctcttcccatgagtaaacaagacttgcttttagagatcggactcgaggaaatgccggcgcggtttttacatgacagcatggtgcagctcggtgaaaagctgaccggctggctggctgaaaaaaatatcgcccacggcgaagtgaaactttttaatacgccgagacgtctggcagtatatataaaagacgtagcagaaaaacaggctgatattcaggaagaagcaaaaggcccggcgaaaaaaatcgctcaggatgctgacggaaactggacaaaagccgctatcggattttcaaaaggccaaggcgccgaagtggatgacctgtatataaaagatgtaaacggcacggaatatgtcttcgttcaaaaattccaggcgggacaagagacgaagacacttttaccgcagctggaaaatttgattgccggaatgcattttccgaaaaacatgcgctggggcacgcaggatctgcgctatatccgtccgatcaaatggattgccgctctctttgggaaagacgtcatcccgtttgaaatcacaaatgtcgagacgggccggcacacgcagggacaccgctttctcggccaagaagtatctgttgatgcaccggcatcatacgaaaagctgctgaaagaacaaagcgtcattgctgacccgaaagaacgcaaacaaatgatccaaagccagctggacgcgcttgcggccgagaagaaatggaatattccgatcgatgaggacctgctgaacgaagtcaaccatctggtggaatacccgacagcgctttacggatcttttgaatccgaatttctttctatccctgaagaagtgcttgtaacaacaatgaaagagcatcagcgctacttcccggtaaaagatgaaaacggaaatctgctgcctcattttattacggtaagaaacgggaacagccatgcaattgaaaatgttgcccgcggaaacgagaaagtgctgagagcaaggctttcagatgctgcgttcttctacaaagaagaccaaaagctgaacattgatgaaaacgtgaagaaactggaaaatatcgttttccatgaagagctcggctcccttggagataaagtaagaagagtggccgccattgcgggcaaacttgccgtccgcctgaaagcggatgaacagacgcaaaaacttgtgaagcgcgccgcagaaatttctaaatttgacctggttacacatatgatctatgagttccctgagcttcaaggcgtaatgggagaaaaatatgcgcgcatgctcggtgaagatgatgccgtcgctgccgctgtcaatgagcactatatgccgagagcggccgggggagaagtgccttcaacctttaccggcgcggtcgtggctttagctgataaactggacacgattgcttccttcttcagcattgacgtaattccgacaggttctcaggatccgtacggattgcgccgtcaggcaagcggcatcgtttccattctgatcgaccgcaattggagcatttcgtttaaagagctgctgtcattgacagaaacggaaaaagaaaatgagctcctcgatttctttacacagcgtctgaaatacgtcttaaacgctgaagacatccgtcatgacgttattgaagccgttctggacagcacagagcttgagccgtatgcagccgttcataaggcaagagtgcttgagaagcaccttggcacacccggctttaaagaaacggctgaatcactcggccgggtcatctccatcagcaaaaaaggcgagagccgcgatgtcaagccggatctgtttgaaaatgaacaggagaaaaagctgtttgacgcttatcaaaaaacaaaagacagtgtcggggaaagctttgcctccaaaaactatgaacaggcgcttgccgtgctcagcggattaaaggagccgatcgaagactactttaatcacacgatggtaaatgcggacgatgaaacattaaaaaccaaccgtttagcgcaaatgaccgctcttgcagatgtgatcaagtcttttgctaatatgaatcatcttattgtaaaataaagaaaaagacggttgctgtgtgatcggcaatcgtcttttccccttttacataaacatcacagaatgaaaacatagataaagaaacccttccataaaggtggtgagtacgatcgaattaaataaacggcaagaacaaattttacagattgtaaaggaaaacggcccgattaccggagagcatatcgcagaacagctcaatttaacgagggccacgctgcggccggacttggccatactcaccatgtcaggcttcttagaggcccgtccgcgggtcggttatttttatacggggaaaacgggaaatcagctgcttgcggataaactgaaaaagctgcaagtgaaagattttcaatcgatccctgttgtcatcaatgagaatgtctcggtatacgatgccatctgcaccatgtttttagaagatgtcggcacgttatttgtcgtagatcgtgatgctgtcttagtcggtgtgctgtcacgcaaagatttgctgcgggcgagcatcggccagcaggaacttgcctcaataccggttcatattatcatgacaagaatgccgaatatcgccgtctgccggcgtgacgattatgtgatggacatcgccaagtatttaattgaaaaacagatcgatgccctgcccgttattaaagatacggataaaggctttgaggtcatcggccggtttaccaaaacgaatatgactaagatacttgtcagtttatcagaaaatgaaatcatataagcttgaaaactaacggggggataacatggacaatcgcatcatttatgtagtatcagactcagtcggagaaaccgccgaactcgttgtaaaagcctcgctcagccagtttaacggctcagccgatgatacgcatatcagaagaataccttatgtggaagatatcggcaccattaatgaagtcgtgtctctcgccaaagcggacggcggcattatttgttttacgctcgttgttcctgaaatgcgcaaatacctggttgaacaagcggaaaaagcgaatgtgctgtattacgatattatcggtccgctcatcgataaaatggaatcggcttacggtctgaccgccaaatatgaaccgggccgcgtccgtcagcttgatgaagattatttcaaaaaggtcgaggcgattgagtttgccgtcaaatatgacgatggcagagatccaagaggcattttaaaagccgatatcatcctgctcggagtatccagaacgtctaaaaccccattatcacaatatcttgcccataagcgtctgaaagtggccaatgtgccgatcgttcctgaggtcgatccgccggaagaactgttcagcgttgatccgaaaaaatgcatcggcttaaaaatcagccctgataaactgaaccatatacgaaaagaacggttaaaatctctcggcttaaatgacaaagccatttacgccaatatcaacagaattaaagaagagctggagtattttgagaaaatcgtggaccggatcggctgccaagtcgttgacgtttcgaataaagcggtcgaggaaacagcgaacatcattcatcatctcaaaacaaagggccgataactcaggacgctttatcctgggtttttgggtatgcaaatagggaataaacaaaaaggatggcatcttcgcgaagtttgtattataataaaaaattgtgataaaatgtttatttttaggtttaagcttcgtgtgatacgaataaactattatgggtaagatgtcaagaataactcccggaaatttttcgacaaagctcaaaatagatccgcagtcatggagcatatgcgatttcgcttgtttttatgcaggagattgatggagggatggagaattagtcttctaaatgaaaaagaaaagacgatttttgtcgatgcagacgcatgccccgtaaaagaggaaataatgctcattgcatcgcaatacagcgttcgggttattttcgtcgcatcatttgaacactaccagctttccagaagcaaagacgagaactgggtatacgttgatcctcataaagaagcggcagatttatatatcgcaaaccatgtgagatcgggagacgtcgtagtcacgcaggatatcggtttagcctctcttttgctgaacagaaatattgccgtcttatcggaaaggggccgttcttatactgaagacacgattgacttcgctctgatgagccgtcatatgtcaggcaaaatgagaagaagcggcattcattccaaaggacctaaaaaattaaataaagaagatcggaatcgatttgttaccctgcttaaaaaaatcctgtcgaatgatgaagggatttcaaatcaaagcatcgaataatgtacgacggagtgttataagatgggaaaccgcataccagatgaagtagttaatcaggtgcagcagtcagcagacattgttgaagtcataggtgattatgtccaattgaaaaagcaaggccgcaactactttgggctctgtccgtttcacggggaaaacacgccctcgttttccgtctccagcgataagcagatctttcattgcttcggatgcggtgcgggcgggaacgttttctctttcttacggcagatggaaggctattcatttacggaagctgtttctcaccttgcggataaatatcagattgatttccctgatgatataacgattcactctgcatccaggcctgaatcttccggagagcagaagatggcggaagcccacgagcttctgaagaaattttaccatcatttgctaataaatacaaaggaaggccaggaagcgttagattaccttttatcaaggggttttacgaaagagctcatagatgagtttgaaatcggctacgcgctggattcctgggatttcatgacgaaattcttgaaaaagcgcggttttgaggaagaactgatggaaaaagcgggtctgctgatcagaagggaagacggcagcgggtattttgaccgtttcagaaacagaattatgtttcccattcatgatcaccacggagccgtggcggctttttcaggaagggcgctcggaagccagcagccgaaatatatgaacagcccggaaacgccgctgtttcataaatctaagctgctgtataactttcataaggcgcgcctgccgatcaggaaagaggagagagccgttctgtttgaaggcttcgctgacgtcatatccgccgtcagctcaggcgtaaaagaaagtatcgccacaatggggacgtcgctcaccgaagagcatgtgaaaatcctcaggagaaatgttcaggaggtcattctctgctacgattcggataaagccgggtacgaagctacgctgaaagcggccggcctgctccagaaagccgattgtaaggtaagagtaagcatgctgcctgacgggcttgatcctgatgattatatcagaacccggggcggagaaaaattccggaccgaaatcattgatgcaagcgttacggtcatggcttttaaaatgcagtatttccgcaaagggaaaaacttatctgacgaaggagaccggctcgcttacatgaaagaggtgctgaaagaaatcagcgctctttccgggtcgcttgagcaggaaatgtatgtgaagcagctcgcctcggaattttctctttcggtagaatctttgacggaacagctttccatctacgccagacaaaacgcccccggcgacaaaaacgccgaaccgcagacaagacgggcccgggtgacgacaaaagcgaaacggcgccgtctccgtcccgcctatgagaacgcggaaagacttctgctcgctcatatgctgagagaccgaaacgtcataaagaaagtgattgagcgtgtcggctttgaatttaacattgacggacatcgtgcgctggcagcatacctgtacgctgtttatgaagagggcgctgacatgacgccgcagcatcttatggcgagaatgcaggatgaggaaatcagccagctgctttcagatatagggatgctccaagtaaacgaggagctctcagaggccgagttatccgattacgtaaaaaaagtgttggatcaccgaaaatggtcaatgataaaggaaaaagaagcagaaagagcggatgcggagaggcagaaagacttcgtgaaagctgcgtctctggctcaagaaattgttgcattgaaccgatcattaaagtaacaccaaaaagaggcttgcgttctgattggcaatgattccttgcggaggagcaaatagatcgcttaacctcatcatgaattgtcatttattatccgcagccctgcatgctgaaaaagagagaaggcttccggggcggataagaaacataccgcttttagaattcgttgcaagctttggaaggagggatccataatggctgataaacaaacccacgaaacagaaacagaacttacattagaccaggtaaaagagcagcttactgaaactggaaaaaaacgtggcgttttaacatatgaagaaattgctgaacgcatgtccagctttgaaattgaatcagaccaaatggatgagtattatgaatttttaggagaacaaggtgttgaattaattagtgaaaatgaagaaacggaagatcctaatattcaacagcttgccaaagccgaagaagaatttgaccttaatgacctcagcgtaccgcctggtgtaaagatcaatgatccagtccgcatgtaccttaaggaaatcggacgggtaaatcttctttctgctaaagaagaaatcacctacgctcaaaaaattgaagagggtgacgaggaatctaaacgcagactggctgaagcaaaccttcgtttagttgtcagcattgctaaacggtatgtcggccgcggcatgcttttcttagacttgatccaagaaggaaacatgggtctcatgaaagcagtcgagaagtttgactaccgtaaaggatataaattcagtacgtatgcgacttggtggatcagacaggcgattacacgcgccatcgctgaccaggcgagaacaatccgtatcccggttcacatggtggaaaccatcaacaaattaatccgggtgcagcgtcagcttcttcaggatcttggcagagagccgacaccggaagagattgctgaagacatggatctgacgcctgaaaaagtccgtgaaatattaaaaattgctcaagagcctgtttctttagaaacgccgatcggtgaagaagacgattcacatctcggtgacttcatcgaagaccaggaagcgacatctccgtcggatcatgcggcatatgagcttttaaaagaacagctggaagatgtgctggatacgttgacagatcgtgaagaaaacgtgctgcgtctccgtttcggtctggatgacgggcgcacaagaactttggaagaagtcggcaaagtgtttggagtaacgagagagcgtattcgccaaattgaagcaaaagcgcttcgcaaattgagacatccgagcagaagcaaacgtctgaaggattttctcgaatagaatggaacgggtctttttgatccgttcttttttatgtataagatatatggataatatacctttattttactggataagcatatgttttgcaaatgagttcggaaaaaatgcggcatgtcctgaaagggggaaaatgagataagtttatttatattctttattgtaagcgtatacaattcattatacaatagaataaagataattttgtgataaacaaaacagttattttgctttttgtataaattgtgaaatcaatgaaattgctgagcaagaccatttactttttgtaaaaataagttagaattagaagtgtttacatagggggagaatgaaaaagggggatggagatatgaagtggaatccgctgattccttttttgctcattgcagtgctgggaatagggctgactttctttttagctgtaaaaggcaatggagatgcgcatcagatcgcaagcggcggtgaaagcaaaaatgccgagaaggaaactgcaaacgcttcacctgaagagatttataaagcgaactgcatcacatgtcacggggaaaactatgaaggtgtgtcagggccgaacttaaaaggcgtcggcaaaagaaaagatgtcgctgagattaaaacaaaaattgaaaaaggcggcaacgggatgcccgcgggccttgtgccggccgaaaagctggatgacatggcaaaatgggtttctgacattaaataaagctttaccggtccctatataaaagacatatgaaaaactctatccgccgcttggattccgggcggtttttttatatgatagtaaaggaaaaagaacctgagaaaagttgtgatattgtgaatgaaatgaagttatctaaaagattgcagtctgtggcggaatatatccctccgggtgccctggttgctgatatcgggtcagaccacgcgtatcttccttgctatgccgttttgaatcatttggcaagccgggcaatcgccggtgaaattacagacggaccgtttctatccgccaaacagcaggtggaaaaactggacttaagcactcttatctccgtaaggaaaggtgacgggctgagcgtccttgaaaaaggagaagccggcgccattacaatcgctggcatgggcggagcgctgatcgctcatattttggagtccggaaaaacgaaattgacggggcgtgaacggctgattctgcagccgaatattcatgccgttcatataagagagtggctgtatcaggaaggctatgaactgcttgatgaagtgattctcgaggaagacggaaagtgttatgaaatcctcgttgcggaaactggcgaccgtgatgcgccgtatcgggacttgccgatggctgccggaatgcttgcgggtccgtttttattaaaagagaggaatgaagtgtttcttcggaaatggagccaggaacttaagcatactgaacaaatttatgaacagatcagccgcagcgcaaagcatgaaaatcatgaaaaattagctgaattgaaagagcggatttctctgctgaaggaggtaatcggacatgcctaaacatgtgaacggacaggaaatcatccagctgtttgaacaattttcaccgaaggcttttgcggtggaaggagataaaatcggtctgcagatcggtacattgaataagccggtgaaaaatgtcatggtgacactggatgttctggaaaaaacggtagatgaagccattgagaaaaaagttgacttaattatcgcccaccacccgccgatttttcggccgcttaaacagatcaccactgatcagcctggcggaagactgattgagaaatgtataaagcatgatattgctgtatatgccgctcatacgaatcttgatgtagcggacggcggtgtgaacgatctgcttgccgaagctctcggcctgacagacacagaagtgctcgtcccgacatattcggacccgctgaaaaaacttgccgtatatgttccgaaagactatgaagaagctgtaagaactgcacttggcaacgccggagcgggacatatcggcaattacagccattgcgcgttctcctctgagggaatcggcagctttaagccgctggacggggcagaaccgtttatcggacagacgggagaactggagctcgtccatgaagtgagacttgagaccgtttttccggcaagtatggagagaaccgtcataaaagcgctgaaaaaaagccatccgtatgaagaggtggcatatgatatttatccggtggagcagtctccgcttgaaaaaggactcggccgcatcggaaaacttcagcaagacatgacgcttgaagagtttgcgctgtttgtgaaagaaaagtttgacgttaacggagtccggatggtcggagagcgaaacagcaaggtgaaaaaagtcgcggttcttggcggggacggaaataaatatatttatcaggcaaagcggaagggtgcagatgtttacgtgacgggcgatctttatttccatgtagcgcatgatgcgatgatgatgggattaaacgtcgtagacccggggcattatgctgaaaagatcatgagaaaaggcacggctgagaagcttacggcaatggccggagagaaaaactatgatgtgcgcattttcgcttccgaaacagatacaaacccatttactttcttataaaaaaaactgaggccccgggcctcagttttttatttttactttcggaaggatttttttaagcggcacactgtgttcaagctgccatgtcgattcatcgttgtggtcaaactgctctaaaaagcggatgacttcctttgtaatcggtgtcggtgttgatgcgcctgcggtaacggcgacggtattgacgtctttcagccattcgagcttcagttcactgatgtctccgattcggtaggcttttgttccggcgatttcttctgacacttgcgccagtctgttggagttattgcttttcggatcaccgacaacaatggttaagtccgctttctttgcctgctctgagacagcttcttgacgaacctgtgtagccaggcagatttcctgatgatattccacgtgcgggtacttttcttgaactgattccataatatcatggacgtcccactgggacatggtcgtttggtttgtaacgattaatttctcagcctgaatatcgaggtttctcacgtcttcctctgtttcaacgagatgaacgatttcaggagcgacgccgacggctccctcaggctcggggtggccttttttaccgatgtatatgacgtgatagccttcagcttttacttttcggattaagtcatgtgttttcgtgacgtccgggcatgtggcgtcaatcgtaacaagccctttttcctcagcggcttttcttacttcgggagataccccgtgagccgtgaaaataacggttcctttttccacctgctttaaaatctccagacggtttgtgccgtcaagcgtgtaaatgccgtcttcctcaaacgcatctgtgacatgcttattatgaacaatcattcccagtatatatataggtcttggcagtgttttatcgagtgacgcgtttttggctatgaccatggcatcaacaacgccgtaacagtagccgcgcggcgatattttgataacgtccaatgtagatgtcctcctatcaaaagtgagtgtagaggcaatataaaaagccgtagttaaacggctcaaatcttgcattcttctgatctcattatagctaatctttcgtgagatatcaaagaatgttaaatatataatttcggctttgatctgcccgatgttctttttggacgcggctgttccgctgagtctgcctgtgcggcgtctttttcttttgaagcggatgctttttcagacgtcttctttgatgttttggatgaggcgtctgatttgttttcatcttctgtttcatctgttttttcagcttcatcctttttgtcctgttcgtctgtttctttcgtctcgtcagattcattctcgttatcactgctgcttaattggctgtaaagcttcatcatggcgggcagactccgtactaaaggaccgtactgctggatcatcggcgtaacctgctgcgccacgccgagcaccttctgaacgttgccgagcatgctcgacagggatgccggacttgccaggttctgtattccctgcagtcctgcacctgctcctccgctggccgccgccggtgccgacgcggcagcgcttcctcctcctgaaccgggtaaaaaacgggaaagcatcccttttaagccccctccgccgcccgtgcctgcgtttctcaggcccgctccggccatctgctgctgagggaaaaactgccgtccctgctgcatcagctgccgtcccggcaatgacggtcttcctcccatcatcatacgcggattcataaacggccggccctgctgcgccatatttctcatcggctgctgtggaaacatacttgtacctcctttctgtctctctgctattacaatatgcatcggagggggcatttgcttttctgtctcgaaaacaggattcccccaagacatggtgtttttaagtaaaatcggttataatgtgatgatggacacagaatgtgccgctttaaggagctgggaaaaatgaaagaaactaaatttgatggatacaacttaaaaccgtttattatagatgcagttcaccgccttggtttttatgaaccgacagatattcaaaagcgtctgatacctgccgtactgaaaaacgaaagcgtgatcgggcagtcccagacggggacggggaaaacccacgcctatttattgcctattctgaatcggattgatccgggttctgatacggtacaggccgttatcacggcgccgacgagagaacttgccaatcagattcatcaggaagcgctcaaaatcacacagggtgcggaagatgagccgatccggacaaaatgcttcatcggcgggacggacaagcaaaaatcaattgataagctgaaaacacagcctcatctcgtcgtcggaacgccgggccggatcgcggatctgattaaggcgcaggcattgaacgtctataaagcgcagtctctcgtcattgacgaagctgatctgatgcttgatatgggctttttagaagacgttgattatatcggatcgcgtatgccggaagaactgcagatgcttgtgttctcagctacgattccggaaaagctgaagccgtttttgaaaaagtatatggaaaatccgaagtatgcgcatgttgagccgaaaagaatcacagccgaaaagattgaacatgtgttggttccttctaaacagcgtgataaagacaaactgctttttgatatgatgtctcatctgaatccttatctgggcattgtgtttgcaaatacgaaaaacacggctgaccatattgcgaaatacctgactgaaaaaggaatgagggtcggtcttctgcatgggggattaacgccgcgtgagcgcaaaaaggtaatgaagcagattaatgatctggagttcacttatgtcattgcgacagaccttgcggctagaggaattgacattaaaggcgtaagccacgtcatcaactacgagcttccggacgatctggatttttatgttcaccgcgtcgggagaactgcacgcgccggttcatcaggccaagcactgaccatttatgagctttctgacgaagatgcgctcgtaagactcgaaaagatgggcattgtgtttgactatgcggagcttgtaaacggcgaatggaagaaaggcgatgaccgccaccgccgtaaaaatcgcaaaaagacgacaaatgaggctgaccaaattgcgaaacgcctcgtgaaaaagccgaaaaaagtaaagccgggctataaaaagaaaatgagctacgaaatggaaaaaattaaaaagaagcagagaagaaaccaatctaacagaggaaagtagggggaatcgggttgctgaaaataggttcacacgtctcaatgagcggaaaacatatgctccttgccgcaagcaaggaagctgtttcgtacggggcgaatacatttatgatctatacgggcgctccccaaaacacgcgccgcaaaaaaattgaagacttgaatatcgaagcgggccgcgcccatatgaaggaaaacggcatcgacgagattgtcgtgcatgcgccgtacatcattaacatcggaaatacgacaaatccggcaacgtttgagctgggcgttgattttctgcgttctgaaattgaaagaacggcagcgatcggcgcgaaacagatcgtgcttcatccaggagcgcatgtcggagccggggctgagacgggcatcaaaaaaatcattgaaggtttaaacgaagtgattgttcccgatcaaaacgtgcagattgcgctggagacaatggcgggcaaaggatcagaatgcggaagaagctttgaagagctggccgagatcattgcgggagtcacgcataatgaacatctatccgtctgctttgacacttgccacacccatgacgccgggtatgatgtcgctaatgattttgacggtgttcttaacgagtttgataaaatcgtcggcatcgatcggataaaagtccttcatgtgaacgacagtaaaaatattaaaggcgcccggaaagaccgccatgaaaatatcgggttcggagagatcggttttgacgctctgcagtacatcgttcatcacgagcagcttgccgatattccgaaaatcctcgaaacaccgtatgtaggcgaagacaagaaaaataagaagccgccgtaccgttttgaaatcgaaatgctgaaagaaaagcagtttgataaggagcttcttgaaaaaatatcagctcaataagaaagaaaggaggggcgggtgtccctcctttcttaccctgagaattgattgaaaagttcgtcaactttccgcgccgtttcttttgaggttatcgtttccacttttttcagcaggcgcagccgctcctgttcatcaaaaatattaatgttttttccgtgcatcagagccgctacctcagccgcttgacttcttgtaatgctgattccgtattgcttggaatatttcagcagatcgtccgcagtgacttgattgagccgctgcaaaataattctttgtattaaaatcatcgatactttcacctctttagacataatgtattgagcagatcattaaaatgttacagcttttaatggtaaaataaagttgcttactgtttaaaatagttattataggaaaggagattttatgaccccaaataaacagcataaaagagaatcatttttacactttatcttcagggtcattatgattctgatcggggcgggttcagccgccgtaagtattgaattgtttctggtccctaataattttatcgacggaggcattatcggtgtttcattaattttagaccacctctttatgtccaatcccctcctcaattttgccttattcgttgtgttactcaacattccatttatgattttcggatataaatatatcggaaaaacatttctcatctctactgttatcggaatcgtcggtttagcgctgattgaatcctcattgcaccatgtggaggccattacgacccagcctattttggcgacggtattcggcgggcttttgctcggtttcggggtaggccttgtcatccgaaacggaggctcgatggacggtactgaaatcctcggtatccttctcacgaaaaagctgcccttttcagtcggggaattcgttatgctcatcaatgtgtttattttcatttgggccggttttgtgttcggtccggagcaggcaatgtattctttcatgacttattatattgccatgaaaacgattgacgccgtcatccaggggcttgatgaaacaaaagcggtcattattgttgcagagcaatatgctgagatctcagatgctatattgcaccggcttggacggggaaccaccaaacttcagggtaaaggcggatatacggatgaaaccaaagaagtcatttacgcggtcgtgacaaggcttgaagtgactaaattgaaatccattgtgtttgaaattgataaaaacgcctttattacgatcatgaatacccatgaaacgaggggcggtaagttcaaaaccgcgattcactaggctttcatttacttttcatcattttataggtataatttgatacatcataagaaaatggcctgctgttcagacagctgccattttctttttggagcgataccgtgttgtaaaggggaggtcctcatgaacgtacaagaagcgttgaacctgctgaaagaaaaagggtataaatatacgagtaagagagaagacatgctgcagctttttgctgattctgataaatatctgaccgccaaaaacgtgcttgccgcattaaatgacaactatccgggtctgagctttgataccatatacagaaatctttcgttatatgaagaactcggcattttggaaacgacggagctatccggagaaaaactgttccgttttacatgctcttatacccatcatcatcaccattttatctgtttaacctgcgggaaaacgaaggaaattgagtcctgtccgatggataagctgcacgatgatttggaagggtatgaaatcagcggccataagtttgaaatttacggcacctgtccggcgtgccgataaaaaacctcctgcttatacaggaggtttttttcagcttttgacatgctggaagctgtgtttgtttttattaatccaggcgacggcttcaagccaattctgcaccctgataatattggaatcgatggggagctgattatatggggagttaaaaaggataaccggaatgcctgcttcttttgcgatcattgtcgcattgccgtggtgatcttcgaaaaataaatcaatgccgtgttttttgacggcttccactttgtgatggcctccgacaagctcaatgtgatcgtaatgaatgtcccggtttgcaaaccagtccagcgtaacatcttctaagtggccgcgtcttgccgtaatgtagatcagacggtgctcttctttcagtccgtccagtgcctgcttggcaaattccgcgagtttcgcttctttatatatggctgcttcatgaacgttcatccattcccaaaattcctcgtctgtaatgttcaaaagcttcgtcagatcataatcagtcatatcatccaaggtaatggaaagatgaaatgagcggtttaaataagggacaaatgtatcctgtgccgtaactgtgccgtcaatatctatacctaaccgtaacatgtccacactcctataaattcatcccttcaagtgtaacataaacaattaacaataccagaaaagtttagcaaacatgaatccgtaaaaaacgcggaaactaaaaaagctcctttcataaaagaaaaagggggaattgaaggtggcatacgattacgaaaatcgaaaaggcaacgactactatgtggatcatggatcggaaggaaccgatatcacgcgtgatgtttattcagaagaaacagcggccgaaatctcagagccatatcgtgcttctgaccgggcagcagaccgtgatgataatcgggacggagtaagtgaaggccgggggatagggtatgcagcattggctatttctatcatttccctgtttgtgctccctgttttattaggggcatgcggcattatcgtcggctatatcgccagaagaagaggagcaggcgctttaggcggatgggcgatgggaatcggtattgtttctcttgtgctcggcatcttcattacaccgtttttttaacacaacgcaaaaaaaagcttggcggaatatccgtcaagctttttgtgtttcttgttctgcttttgctttttccgcttcaagctttgcgtagtgttcttctgccagcttgtcgatttcttttttcagctcttcgaccatggtttcttcagggactttgcggacgatttggcctttgcggaaaagaagtccttcgccgcgcgcgccggcaatcccgatatcggcttctcttgcttcgcccggtccgttaacggcacatccgagaaccgctactttaatcggcgctttgactttagaaatgtattcttccacttcatttgcgatgctgatgagatcaatttcgatccgtccgcatgtcgggcatgaaataagcgtagccgcgtttgaagcgagaccgaatgatttcagcagttctctggctacttttacttcttcaaccgggtcggcgctcagagagatccggagcgtgtttccgattcctttgcttaaaatcgctccgagtccggccgcgctttttaccgttccggcaaacagcgtgcccgattctgtaattccgaggtggagcggataatcaaatgcttttgacgctttttcgtatgcttctatggcgagattgacgtcagacgctttcatgctgacgatgatgtcgtgaaagtcaaggtcttccaggattttgatatgatgaagcgcactctcaaccattccgtcagcagtcggatagccgtatttttctaaaatgcgtttttccaaagaacccgcgtttacgccgatccggatcggaattcctttttctttcgccgcttttacgacggcttccactttttcgcgccggccgatgttacccgggttgattctgattttgtcggcgccgccctcaattgcttttaatgcaagcttgtagtcaaaatgaatatcgacaacgagagggatggaaatttgttttttgatgtcggcaatcgcgttagcggcgcgttcgtccggacatgctacccggacaatttggcagccggcttcggctaaacggttgatttccgcaactgttgcttctacgtcgtgtgtcttggtcgtcgtcatactctgaataacgacttcgttatttccgcctattgttaaaggtcccactttgacgggacgcgtttttgtacgatgtgtgatttcactcacttgtcaatcgctccttaattgtagttaccgcttttgcaggctgagccttttacatgtcaggcaacttctatttacatgttatattgtaacagtgtatttgccgaactgacaagaaattaacgtttaattgcggtagacggggaatttataagcggtgcctgcccgaatggcgtttgcttttacattcggattcagcgcttcaaaatcttgtgcaatatcatcaggagctttatgtgcgccgactatcgacatcaccgtatcgccttttttgaccgtaaccgttctgtatgaagcttcctgttttgctggctgtgccgccgctgcgtatgctggaaggtcttgagaagggatcgtgccgattttaagatcgtaaaagataatgaatatcacaaataaactgccgaatacaaaagtaagccgcttcattccaaccgcctcccgcatacatttttacttcattgtatgcttgtcccattttgttcatgacaaaaaagaagaccgccgggggcagtctttgttacacagctgtttttcttggcggtatctcttttaagacgaggaaaaggatgataaagtttacaaaccaattcactaaaaattcactcggcactgtaataacaagcgcgcgcatgatcgtaaagaatatggtcgaaagtgtaatggaataagccgaaagcttccagagctgctggtaattcaatgtctttctttgcgcatttttcaatatcaggccgatgacggcgagaaatgatacttcaatgaattttccggccgctgtcatgatgaacagcaaaacggacaggacggtgacgatcattgttttattttggtttaatgctgatatgatttctttttttgtgatatcagcaggcatcagcgaataattcatttctgtcgcctgtccgtctacagcaagcaccattttattttttaaaatgccgatcgcgttttgtttcgccgctatttgtttcgcgccgtaagcatctgtcggatcaaacacgatgacaaagccgttagcttccgtttccttagaggcggacgctttcgtctgcaattctccgtttgaaatgctgaaatcagggaaatctttctttaacacggttttgaaaccgttcattgagtttacggtgccggagcaaaggtaataagcgcttggcagcgtaaaaaggacagacagcaaaaatacataaaggatcgcttttcctatcccctgaaaccgtgtttttgcaatatccgccggagagtatgtacttttcaataaagccgtaaatatgttcaacatcttcacttcctagcctaaactggtatatgttgcttattgtatcgttcacaggggatgaacacaagtgagagtatttaaagcggtgataaggaatcatacataataagataaagcgggaagctgtgatcgcccgcaaaacaaaggagggtgtttttgtcatgagtgttttgtattggctgattatcattgcggtcttcgtcattgcttttatcggacttgtatacccggtgattccaagcgttatttttattgtggccggttttcttctctacggatttttgttttccttcagtccttattcttacctgttttggctcattgaggcggtatttgcggccgttttattcgcagctgactatgtgtcaaatttacttggcgttaaaaggtacggaggaagcagggcggcaatctggggaagcacgatcggattattgatcgggcccttcgttattcccgtggcgggcattatattaggcccgtttatcggtgctctctgcgctgaggtgtttgttcatcaaaaggatatcaaggccgcggcaaaagtggggctcggctcgttaatcggctttttaacaagcgtcgcggcaaaaggcgtcattcagctctttatgatcggatatttcttatggacggtgctttagaaaggtttaatttcggccgtgaacggataaagtgtaatatgtctgctggaatcgccggattgtgagctttttcattgattaccacgctttcttttgttacattgagattagaaaagttcgcgttaagcggcatttcagtacatatatttaaaggaggaaaaaattatggcttacaaacttccagaattgccttatgcttatgatgctttagaaccgcatatcgataaggaaacaatgacgattcaccatacgaagcaccataacacatacgtgacaaacctcaacaaagcgatcgaaggatcagcgcttgcagagaaatctgtagatgagcttgttgctgatttgaacgcagtgccggaggacatccgcacggcagtccgcaacaatggcggcggacatgcaaaccactctttattctggactcttttatctccgaacggcggaggcgaaccgactggtgagcttgctgaagagatcaaaagcacgttcggaagcttcgatcaattcaaagaaaaattcgcggcagcagctgcaggccgtttcggttcaggctgggcttggctcgttgtaaacaacggcaaacttgaaattacaagcacgccaaaccaagattcaccgctttcagagggtaaaacacctgttctcggtcttgatgtttgggagcacgcttactacctgaactaccaaaaccgccgtcctgattacatttcagctttctggaatgttgtgaactgggatgaagttgcccgtctttacagcgaagcaaaataaatagttcgatcaaacaaggtctcccgcgggagaccttgtttttttattgactttgattccttttacatatctcagtttgagtgagacaaactaatgtgtagtaaaggggagtcaatgatgagcaaaataaaaaaaattatcggcgacatcgaaataaataaagggctgctgctgttattgacgattggcggtctttactcattgggcatcgcgctgtcaaatacatttgtcaacgtgtatttgtggaagcagtcgggaaaatttattgatttggccatatacaatttgtcggtcgtaacgatgcagccgattacctttctgctggctggccggctggctaaaaaaattgacagggtgtttattctcaggttcggcgttatctttttggccgctttttatttaagtgtgctgcttgccggagaaactgcggcttcccgtctcgttttgataggggccgtgctcggagttggatacggcttttactggctggcttttaatgtgctgactttcgaaatcacggaaccggaaacgagagatttttttaacgggtttttaggcattttgtcttcatcggcgggcatgatcggtccgattgtggccggatatgtcatttcaagacttgaaaataatacgggttatacaatcattttcagcctgtcgctcggcttatttgcccttgccgtggtcatgagcttttttctgaagcggagggagtcgaaaggccggtttatgctgaaaaaagtttttggtgagcgccacacgaatctgaattggcgccggattaccaacgcgcacttttttcaaggcttgagagaagggatttttgtttttttaatcagcgtatttgtattcattgcgacaaacagtgagctggcgctcggaacattcggcctcgtcaattccgcggtttctttttttgcctattattttgcatcaaggctcatcaaaaaaagagcgcgaaaaaaggcgattcttatcggcggattgatcttgtacggcgccctgtttctcatcatttttaaaatgagcttcacgacgctccttttgtacggagtgtttattgcgatcggctatccagttctgctcgtgccgtatgtctcgcttacatatgatgtgataggccgggcgcggcttgccagaaaagccagaattgaatacattgtgctcagggagttatttttaaatgcgggccggatcgtttccatcctttgtttccttgtaatcgttacattattcaaggaaaaagtgggaataccggcggcgctcgtgctgctcggagccggccatccgctgatttattactttataaaagacatcaaactggatacggaaacttctgatgaaacagtagaagaagaccgacaaaaacaggcggcggaaccgaattttataaaaggagaaagataaaagggttatctgtagaaaaatatcgaaaaaacctttagaatgaaaaatggcacctgaacagaaggtgtcatttctttctgtaaataagaaaaggtgatgtcatgaggagaaataaaaagaaaatagctgtaaacaaagaaaagaaaaaatcactgccgatccggcttaattttttgtttttggccgcgtttcttattttcacttggattatcgtcgagcttggcatcaagcagatcgttcagggtgatgattataaaaacgccgctaataagcaggaggagtctgatgtcagcacggcggttccgagagggaaaatatacgaccggaacctaaatcccatcgtaacgaataaagcattaaatgcgattacatatacacgttcagcctcaaccacccaggcgcagcgtttaaaaatcgcaaaaaaactgtcgggtatgattaaggtaagcaccaaaaaggtgactgagcgggataaaaaagactattggatgttaacgaggcctgatgaagcgaaaaaactgattacggccgaagaaaagcaaaaagctgaagacaaaaaactgtctgacgatgatttatatcagcttcagctgaaacgcatcacagacaaacagctgaatgaactcacttcaaaagacatgcagatccttgcgattaaaaggcagatggattcaggctactccctgacgcctcaatacatcaaaaatgaaggcgtgtcggcaaaagaaatggccgtcgtcagcgaacatttagatgaactgccgggagttgacgtgacgtctgactgggaacggtcttatccttataaaagcctgatccggacattgctcggcagtgtatccagttcgaacgaaggtcttccgtccaacctgctggatcactatctgtcactcggctacagccggaatgacagggtcggaaaaagctatttagaatatcaatatgaaagcctgctgcagggtcaaaaagagaaagtgcagaacttaaccgactcatccggaaatgtcacgggcagcaaagtgatttcaaaaggacaggccggcaaagaccttgttttatccattgatatggacctgcagaaatccgttgaaaaaatcattgagaaaaatttaaaatcggcaaaagcgagaccgagcacgaagcttcttgatcgggccttcgtcgtcatgatgaacccgaaaaacggagaagtgctgacgatggccggcaaacagattacgaatgaccatggaaagtacaaaattaatgattatgccctcggcgcaatgacttcctcctatgcaatgggatcggcggtcaaaggagcgacggtgttgaccggactgcagacgggcgcgatcaatttgaacaccgtttttcaggatgaacctatgtatttcaagggaagtaaaaacccgaaaaaatcatggacgaatttaggtcccgtagatatcgaaaaagcgcttcaggaatcatcaaacgtgttcatgttcaaaacggcgattgctgtcggtaaaggggagtacaaaaaaggccagtccctgccgcttgatatgaaggcattcgatactttcagatactacttcaatcagttcggactcggagttaagacgggaattgatctcccgaatgaagcgaccgggtaccaagggtcacagcgaatttccggtcttctgttagactttgccatcggacagtatgatacgtttacaccgctgcaaatggcgcagtatgtatctacaatcgccaatggaggctatcgtttgaagcctcagcttgtaaaagaggtcaggcagcctgattcgaaaaaaggaatcggagccgttgtagagtctgttcagccccaagtactgaacaagattgatatgaataatgcagatattaaagaagtgcaggcaggtttcagacgcgtcatgacaaaagggacagccgcaactgattttgcgacggcgacatacagtcctgccggtaaaacgggtacggcgcaatctttctatgacggtccggacaaatcagagacgggtgaaggaacgtataatacgactcttgtcgcttatgcacctgcggataatccggaagtggctatttctgtagtcgttccttgggcctatattgattacagcgatcgatattcgattacgaatgatataggaagagcagctctggacaaatactttgagctgaaaaagaaacaagaagataataatacgaagcagaaaaacgaagataaaattcaggaagacgctgaaaacggcaatacaaatcactaacagaaaaacgctcacaacttgtgagcgttttttttatacaaaaaaacatccggatttacaaaaccttaacacttgatttatacgcattttacaagaaccctttactctagacctgtaggacaaattacacattaaatgcagggggaattcaggaaatgaaaaaaaacaaatggatgcttatgcttctgatggctgctgttatgattgttgctgcagcatgcggaaatgcaaaggaaagcggcaagacagacagtcaatctgcaagtgaggataaaaaagcatcaggttctttaaccatttctggttcatcagccatgcagccgttagtactggcagcggcagaaaagtttatggaaaaacatccggatgctgatgtgcaggtgcaagcgggaggttcaggaacaggtctttcgcaagtgtctgaaggggcagtgcaaatcggcaactcagatgtctttgctgaagaaaaggaaggcattgatgcaaaagccctaaaagaccaccgagtagcggtagtggcgatggcggctgcggtcaaccccggtgcgggcgtaaaggatataaccaaaaaacagctgacagacgtctttacaggaaaaattaaaaactggaaagagcttggcggtaaagatcaaaaaattacacttgtgaaccgtcctgattcatcaggaacacgcgctacgttcgtcaaatacgcgcttgacggagcagatcctgctgagggcattacagaggattcctccaatacagtcaaaaaaatcattgcggaaacgccgggagctatcggttatctggcattctcttatataaacgatgacaaagtaacgcctttatcgatcggaggcatcaaaccggaagagaaaaacgtcgtcacaggcgagtatccgatttgggcttacgagcactcttatacgaaaggtgaagcgtcaggccttacaaaaacgtttcttgactatatgaacagcgatgaagtacagaaaagtatcgtaaaagatcagggctacattccgatctctgatatgaaagtcacacgtgacgcaaacggcaagcaaagctgaggggagggcgggctccccgcctcttcttctttataggagtgtaaacaaatgataaatcacagagaaaaagagtctgtaagcgaacgcttaataagctcaaaacaaaacaggcaattggatgaagtccgcggaagggtgattgtgtctgtgtgtgccgcgattatcattgcggcatcagcggcgatcacaatttttctcggcataaaggggctgcaatctttttttgtaaatggtgtaagcccgattgagttcttaacaagtctgaattggaatccaacccaggcaaaacctgagttcggcgcgctgccttttattttcggatcatttgcggtcacggttctgtcggctctgatcgcagcgcccctcggtattgcgggtgccgtgtttatgacggaaattgcgccgacttgggggaaaaaggtgctgcagccggtaattgagctgcttgtcggcattccgtccgtcgtttatggattcataggtcttacagtattggttccgtttatcggctcttttaaatcaagcggaacgggtcacagccttctggcggggacgatcgtactctcggtaatgattctgccgactgttacatcgatttccgctgatgcgcttgcgtcacttccgaaacatcttcgcgacggttcatacgcgcttggtgcgacgaggtggcagacaatcagaaaggtgcttatcccggcggcgtttccgacattgctgaccgctgtcgtgctcgggatggcaagagcattcggagaagcactcgccgtacagatggttatcggaaatacaaagcttctgccggaaagcctgcttgatacggcgggaacattaacgacgattatcacgttaaacatgggccataccacatacggcagtattgaaaataatacgttatggtctatggggcttgttcttcttatcatgtcgtttctgtttatattgctcatacgctacttgtcatctaggaggaaagtgtaatgaaccggaaaataacggataaattggccaccggtgtattcgggttatgcgctgctgtaatcgcggcgattttggcaggattgtttttgtacattcttattcacggcgtctctgaaatctccttgcattttcttacgtcaaaatcgagcgctattgcgtcaggcggcggaatacgggatcagctttttaactccttttacattctgtttatcaccatgctgatcacgataccgcttggtgtggggggcggcgtctttatggctgaatatgcgccccaaaataaaatcaccgattttatcagaacgtgtattgaggtgctgtcttcgcttccgtccattgtcatcgggatgttcggcatgctgatgtttgtaaacctgaccggatggggctacacgattatcggaggcgcgctcgcattaacggtctttaaccttcccgttatggtccgggtgacagaaggcgcgctcactgcagttcctaaggagctgaaagaagcttctctcgctttaggcgtatcgagatggcataccgtcaaaacggtgctgattccgagtgcgattccttcgattttaaccggagccattctcgcatcaggaagagtattcggagaagcggccgcattgttatttacagcgggactgacaacgccgcggctgaattttaccgatttaaacccgttttctgaatcatctcctttcaacattttcaggccggctgagacgctggcggttcatatatggagtgtcaatacgcagggaatcatccctgacgccgaagcgattgcaaacggcggctcggcggtgctggtgatttcggtgctcttgtttaacctttgtgcaagatggctcgggtctgtcatttataaaaagcttacggcaaattaatcggaaagaggcgaaaacatgattgattacatcatcagggaacaagcggaacagacaaagcgttcgccggagtcttcgattttggaagtgaagcatctatcaattcattacggtgaaaaacaagcggttaaagatgtaaacatggatattgaaaaacatgcggtgacggctctgatcggtccgtccggctgcgggaaatcaacatttttgagacagattaacagaatgaacgatgccattccttcggcaagaagcgagggagagattctttatgaagggctgaatattttgggggaagcgattaatatcgtgtctctcagacgggagatcggtatggtgtttcaaaaaccgaatccgtttccgaaatccatttacaataacatcacacatgcgctgaagtatgcgggtgaacgcaggaaagccgttttggatgatgcggtcgaagaaagcttaacgaaggctgcgctttgggatgaagtcaaagaccggcttcattcatcggctctgtcgttatcaggcggccagcagcagcgcctttgcatcgcccgtacgcttgcgatgaaacctgccgtacttcttttagatgaacctgcttcagctctggaccctatttcaaacgccagaatcgagacgcttttgacagaactgaaaaaagattattcgattattatcgttacgcataatatgcagcaggcgcttagggtgtcagaccgaacggctttctttttaaacggggaagtggtggaatacgggcagacagaacaaatttttacgagtcctaaagcgcaaaagacagatgactacattaacggaaagttcggatagggggaaggactgtgagccttgtgaaggaagcggtgcacacacataatttatttgatattcacggcatgaacgtatggtacggagcccatcaggctttaaaagacattacgatcggttttgaggagcggaaggtaactgcgatcatcggtccgtccggctgcgggaaatccacttttattaaaacattaaacttaatgctgcaaatgaccccgaatgtcaaagtgacaggcgacatgatctataacgggcgcaatctgctgaaagaaaagacggatgcggcagaattaagaaaacagatcggtatggtgtttcaaaaaggcaatccgtttccgcagtcaatatttgagaatgtcgtgtacggaccgagaatccacggcgaaaaaaataaaaagaaactgcttgaaatcgccgaggaatctttaaaggcagcagcgctctgggatgaagtgaaggatcgccttcaccagcaggcgctttcactgtcaggcggtcagcagcagcggctgtgcatcgcaagggcgctcgccaccaaaccggacgtccttctgatggatgaaccgacgtccgctctcgaccccgtatccacgcggaaaatagaagagctgattttgacattgaaagaaaagtatacaatcgtcattgtgacgcacaacatgcagcaggctgcgagggtctctgatcaaaccgcgtttttctatatgggcgaactggtagagtggggggatacgggcaaaatattttctcagccggatcatcaaaaaacacatgattatatcaccggaaaattcggatgaaaaaaacgggcccggccattgaccgggtccgttttatactgtctattaaaaaagcctgccggccgtatccatctgaatggacgatgcctgcaagcttttttagcgggttaatgttttgacgatttttttaaagctcatatctgagtcgactttgaaatggccggcgcggatttctttatggtagcctgcgtcaatgacgtaatcattaaagtccttcgctgaaggaataatcccttctttttcaagaatggatgacacatcagcagtgctcattccgtctttaatcgtcagtttgtatgttacttttttctttttggcgtctgtgttttggtcgttgtttaacgatttttctttagaatcaagcagtttttgatagtcatcccggttgacggagactttttgctgatcgtcgaggtagctgtttacttctttttctgtcaatgctgttttttcggttttaacggcggctgcctggtcatggtcagtcaagtagaagacagcggcgaggacggccgtcgctaaaatcatgcctgctgcaaaagcctgaatgccccgttttgtcatacgagcaccttctcattatctttaataatggtattgacgtcctcgacagacacgtgctccgcttttgcgatggcttccgcagacattccgttgttatattttgaaatgatttgtttggcgattttttgattaatgccgctgcttttggctttgcggatcacgaggttggtttccagcaattcttcttcaagcaccgtcattttctttttcagcttgtaaatttcctgcatggcggaaagctgaagcgtttcaagctcctgttccacatctttcatcggatctctttgagaatatgagaatgcaataagcgctatactgacgataaacaacgcaataatagcaatttccacgtttcatcaccttctattattaatttgcccttcttttttataccataaaacgccgccattctaaaggaaatagagaaaaaaacggaattttgtcgggaaatcttttttattcggggagcaaacggttatttctctatagatttcgcatcagaaagcccttttttgtcctgtttcgtcatattttcccttcatctgacgcaagctcattcagaggatcagaagcgtaaactgatgttttctgcacttaaacaacatttcatgtaaatcactctagcattccgtccattatagtggtattatatataagtctgaataagtaaatgatatttagtttggagggaaaataatgcgcgttaatattactttggcttgcactgaatgtggtgagcgtaactatatttctaaaaagaacaaacgcaacaatccggaccgcgttgaatttaaaaaatattgcccacgtgataaaaaatctacgttacaccgtgaaacaaaataagctgtttaaaacagcggaaaaagctggagctttcaataaagttctggcttttttgtctttcagggaggtttgagaaacgtgaaagcacaaatcagaaccgatataaaagcaaagctttctgacatgtcagaa

SEQ ID NO: 55 - DNA, 110415 bp, Bacillus amyloliquefaciens
ttattaatacagtggcgggatatgcaagcgcgggagttacaatttcctgatagattgcagactgacttcggtcagtcttttttatgtgttatatcaattgtgtaaaagtaaatatatacctatcatcacctttttggtaagccgcaagagaaaaagatcacgaaaattctcaaaaatgagaaataaagatttgaaaaatggtatgattttaggaggaaaggacggctggtgctgtgttggaagcgaagcggttttatgtctctctgcaaatgaaaatcgccggattaattacggctttattaatacttgttatcggaacgctcacggttatatttgcctttcagcaattaaaggaagggcagaagcaggctgaacagctggcggtgcaaaccgcaaaaaccatttcatatatgcctcccgtaaaagaggcgttccggcttgcggatcaagaggcttttacaaagttagacgtcattgaacaaatgaaagaacaggcaggcgcgcacgccgtctacatcactgatcaaaaagggcatgttgcatttcattcggcccgaagcagtattccgaaagaaaatcaaaatctgcaaaacaaaaccgtcatgttcggcgggtctccggtttccgacggaatgaaggccgtccggggaagcgccccggttattctggaggaaaaaaatcataacgaagtcgtcggaacggtgacagtcgagtttctacaagatgagatagaaaaagatatgaaagcgcatctgcggcatttaggctattttgcatgtttggtgtttcttatcggcatcgggggagcggcggcgctcgcaaaaagcatccgtaaagatacactcggccttgaaccgcatgaaattgcagcgctgtacagagagcgcaatgcgatgctccttgcgatgaaagaagggattatcgccgtaaacaaagcaggcgcggtaaccatgatgaatttgtctgcggctgatatgctgaatctgccggaaccgatgatcggaaggcatataaaagaaatcatgccgggcgcaaatttcatgccggtgttggcagggggagaattaccgccgaacgtggaggtgcgtgccggagataaagtatttatcttaaacgtgaaagaaatgaagcagaccgggcaagtatacggagcggtgatcagcttccgcgaaaaaacggagctcaagaaactgattaacaagctgactgaaatgaaaaaatactcggaggatctccgggcgcaaacgcatgaattctcgaataagctttacgcgatcctcggtctgttagagctgggagaatataatgaagccattgaactgataaaagaagagtacgccatccagaatgaacagcacgaaatcctctttcaaaacattcattcacagcgggttcaggccatactattaggaaaaatgggaaaggcgtctgagaagaaagtaaagctttcaatagatgaaaacagctttttagaatcgctgccggagcatgtgggttcatcccagctcattacgatcatcggaaatcttattgataacgctttcgaagccgtcgccgaaaaagagaaaaaagaggtcgccttttttatgaccgatatcggcagggatatcgtcatcgaagtggcggattcaggagacggcgtgcctcaggaaaaaacagaaacgatatttgaaaagggctactcttcaaaggggacgaggagaggatacggcttagccaatctgaaagaagccgtcagtgaattgcagggatcgatagagatttcgcagcaaaagagcggcggtgccgtatttacggtgtttataccgaaagaaaggccaaagggggaatcggtgtgattaacatcgcgattgcagaggacgactttcgaatagcgcaaattcacgaaaaatttatcgaacatcttgatggattcaatgtcatcggcaaagcaatcaatgccaaagacaccatatcgctgcttgagaaacggcagcctgatctgctgcttttggatatttatatgccggatgagctggggacagatctgcttcccctcatccgcggccgttttccttccgttgatatcatcattattacggcttctgccgaaacaagactgctgcaggaagcgctcagatcaggcgtttcccactatgtcataaagccggtgtcggcacataaatttacagaagtgcttttgcagtaccgggaaaaaagagaatggctgcactcacagccggagctgagccagtccgttatcgacatgtttttcggaagcggtcagaaagaacaaaaacagctcaatgatctgccgaccgggattaattcgattacacttcaaaaaatcaaaaacgcgctcagggcagcccaaaaagggatgacggctgaagaactgggcgaaaaaatgggcgcctccagaacaacggcgcggcgctacgccgagtttctcgtttctcgggaagaagcgctcgctgaattagagtacggcattatcggcaggccggaacggaaatattatttagcacatgaataagggatgggagaaatgaagcggttgggagtgtttcttgtcatgctggcggcgctggtttcttttgacggacggcagatggcgggcatccgttcagccgaagggccggttgaaattgtcgtcccggcggcgcctcaagggggctgggacgtaacggcaaaagcgttgcaatcggtaatagagcggaagcaaatattaggccggcccgtaaagatcgtctataaacccggcggaggcggagacagcggctggaaatatgtaaacgaacgaaaaacggatgtcatcagtatgaattcaagcctgctgttaagcaatgaaattttgggacaaagccggctgaaggcagctgattttacgcctttggccattatcgcaaaagagtggcagaccgtcgctcttccgaaggattcaaagataaaaagcggaaagcggctgctcggcgatattaaagcacatccgggcggcataaaaatcggatttgcgcccggcctcggaaatgatgaccagctctcctttgcgagagcggcggaaatggccggaatttctccgtttgatatccgcttttttcaatacgggagcagcaatgaagtcattgaagctcttatcagccacgagatagacgccgcctcaatgaccatttcagaagcgagagacgcctatcggaaagggaaaatcacattggcggccgttacgtcggacaaaaggctctccggcttcagcgatgtgccgacatggaaagagcagggggtgccgtttgtctttgcgcactggagaggcatcatggggccgaaagacatgaccgaaggcgagatcgcctattgggatcaggctttgaaacagattacctcatccgcggagtggaagcaaatgttgaaaaaacgggattgggagagcttttacaaaaacagcagcggcgcaaaacgctttttagaagagcagaccgagttctataaagagatgatgagcagcgaaaaataagccttccgcatatttgcggggaggctttttatttataaatgaacaaaatgaacgaaaaggttataaaaaattaaaaatctttaaaatccaaaatatttacttcaatatccaattctcataagatagcaaaaaggcggataaaggggatcgggcctttaaaatgtaagcgtattcataataagggggacatactgtgttagcaatcttaggctttcttatgatgcttgtttttatggtgctgattatgacaaaacggctttccgtgttaacggcgctcgtattaacaccgatcgtgtttgcgctgattgccgggttttcttttaaccgggtcggcgagatgatgatctccggtattgaacaggtggcgccgatcgcagttatgattatgtttgcgattctttatttcggcattatgattgataccggtttatttgatccgatggtgtcgcgtattttaaagctggttaaaggcgacccgctcaaaattgtagtcggaacagccgttttgaccatgcttgtcgcactggacggagacggctcgacgacgtatatgattacgacaagcgcaatgctgcctttgtatatcatgctcggaatccgtccgattattttagcgggaatcgccggtgtcggcatgggtatcatgaatacgatcccatggggcggcgcgacgccgcgtgcggcgagtgcgctcggcgttgacccggcagatctgacggggccgatgctgcctgtcattgccagcggaatggtgtgtatgattgtggtcgcttatgtactcggaaggatggaaaggaaacggctcggggtgatcgaattaaagcagccgtcccatacaaatgaaacggctgcggctgcggaagatgaatggaggcggccgaaactatggtggttcaatttactgttaacgctttctttagtgggatttttagtgtcaggaaaagtgaatttaaccgtgctgttcatcattgcgttttgtatcgcgctgattgtcaactatccgaagcttaacgatcaaagggagcgtatttcagcccattcgagcaatgtgcttgcgatcggttcgatgatttttgccgcaggcgtgtttaccggaattttaacagggacgaagatggttgatgagatggccatttccctcgtatcgcttattccggaacagatgggggggtttattccggcgattgttgccttaacgagcggtatctttacgtttctgatgcccaatgacgcctatttttacggcgtgctgcccattttatccgagaccgccgtggcgtacggtgtagataaggtggaaatcgcccgcgcttcgatcatcggccagccgattcatatgttaagcccgctcgtgccgtcgacacatttattagtcgggcttgccggggtcacgattgatgagcaccagaagtttgcgatgaaatgggcggttcttgctgttatcgtcatgacggcctttgcgctcatcatcggcgcaatcacgattttttaacataaaacacccggttcgtcgcacactaaaggcatcagaggaggtgccatgatgagtgatccgtttatgccgcttttttcagtgagaagcggcgccggttttaaagcggcggacggcgtttacggattgaccgtgcagattgcgaatgtttactttatcgaaaatccctcagctccgcgggaaatcattctggttgacgcgggaatgcctcaatcggcggagatgataacagaagaaatgaaacgccgattcaaagaggggtatcagctgaaggcggtcattttgacacacggccattttgatcatgtcggtgcgattgaagaactgcttgagctttggaatgtgccggtttacattcatgaaaaggagctcccgtacgtcacggggaaagcagattatccgcctgccaggcccgatgcgaaaaaagggcttgtcgcaaagctgtcaccgctgtttccgcgccatacgatccgcattccgtccgttcaggcactgccttcagacggtaccgttccgtttcttgaagaatggaaatgggtgcatacgcccggccacacacccggccatatttcattattccgggataaagaccgcgttctgcttgccggtgatgccgtgatcactgttgaacaggaatcgcttgcggacgttgtcattcaaaagcaagagcttcacgggccgcccgcctattttacagcggatacgcagacggcggccgcgtccgttcagaaactggccgaactggagccggaagcgcttttgacgggtcacggaattccgatgacgggaaaaaactaccgtgaagatttgcttacactggctgaaaaactgcattccgttttgtaaaacacctgcgaaaatcacaggtgttttttctatgcagtttccagtatgatacaaaaaaaccattgtgttcactcctaaaaacgatacaatgggaaacagatgtaaattgaaggagagagttttttgaaacatacggaaatactttgggatgaggcgaaggattttattgatgtctgctatcaggaactcggaatggaatcgcaaatcaacgcgcgtcttcacgcgataaaagatgagatagatcggacgggaagttacgtccatacggcggaagagcttgaacacggggcgaaaatggcgtggcgcaacagcaaccgctgtatcgggcgtctgttctggcaatcgctgaacgtcattgaccggcgcggtgtgaacacgaaagaagaggtgcgcgacgcattatttgaacatattgaaatcgccacgaacggcggaaaaattaaaccgacgattacgattttccctcctgagcagaatggcgagaaacaagtggaaatctggaatcaccagctcatccgctatgcgggatatgagactgaaaaaggaagagtcggtgatccggcatcatatgaactgacggctgtctgcgaaaaactcggctggcgcgggaagcggaccgattttgatattctgccgctgcttttccggatgaaaggggacgggcagccggtctggtatgacctgcctcagacgctcgtgaaagaagtgccgatcacccatccggatattgaagagtttgccgatttaaatctcagatggtacggggttccgattatcgccgatatgaggcttgaaatcggcgggctgtcgtacaacgcggcgccttttaacggatggtatatgggaaccgaaatcggcgcaaggaaccttgctgacgaaaaacggtatgatatgctcaaaaaagccgcttcggtcatggggatttccgccagcctgaataccgacctatggaaagatcaggtgctggtggaactgaataaggcagtgctctattcatacaaaaaacacggtgtcagcattgtcgatcaccatacggcggcgaatcaatttaaacgcttcgaagaacaggaacaagacgcgggcagaaagctgacgggcgactggacctggctgattccgccgatctcgccggcttccacccacattttccataaatcatatgacaatacgattgtgaagccgaattattattatcaggacaagccttatcagtaactgatggaaaaggtgcggtaccctttcagacggtgtgattcttcgatggttacgcctgtgacatttgagaaggggctgccttttctgactgcttcggcaaattgttttaacgactcttcaggaccttcggcaaggatttccacccggccgtcatcacggttttttacccagccggctatcttatgtctgtcggcttccatctggacgaagtagcgaaaacctacgccctgaacccgaccgtctgcaatcatatgatattgaagcatggaaaaaccacctttttcttactatgataaaggaaagatatgagatttcgcaaaggatgtgaacgaggtgacggaagactattctgtcttatctatcaatctcggaaagcccgcaattcatgaatttgccggcagacaaatcaattccggcatcataaagctgcccgcagattctcccgtcatgctgtataaaacccattttgacggggacgggcaagccgacttgaagcatcacggaggccccgataaagcggtgtgcgtgtatcccgccgtgcattattcatattgggaaacaacgctcgcgagaaaacttcccgccgccgcgttcggggagaatgtaacggtcaaaggactggccgaacaagacgtgtggatcggagacgtctttcagctgggggaagccgtcgttcaagtaagccagccgcgccagccctgcgtcaaactcgcgctcaaatatggcatcaaagatatggtgctccgtgtacagcagacgggatttaccggcttttatttcagggtgcttgaagaaggatatgtcgatccgcgtcccgtcctcaagcgtctgtcgagaggcaaagaaagcatttccgtctggtatgcgaatgaagtgaaatatcgtgattccggcaatctgtcagcgattgaagaaatactgcgggaagaagcgctgtcagaaagctggagggagtccttccttaaaaaaagagacaggctcactaatgtatagaaaaaagccgtgctgcactgccagcacggctgatttacgttatgcttgtttttttgtttccagcagattggcaaggaagtactttttgaagctttgaagctttcttccttcatagtgggtaattccttttttctttaactcttctacataccagcctttactgccataatgcatgtcagaaaactcctttctccgctctcccgctggggaggtttcttcagtttttgccaaacttttggcattgtaacatctataaaaagacgatgaaaagggataacgcaaaaactgagactttcgattcagagatgtaaagctttcttacatatatatgtaaagggcggtcttttcatgcttaatggccggttaattttaacagcaccgttccgagtgtcatgattccgaaaacgacgccgaaataaaccagcatccccttctttttcttcactccgtaaacggtgagaatgatgctttcaataaagaaaataaacccgaagataataaaccacatgttgaaaaatggctcctttcacagacatatgtccagtgtagcacaactcttataacggagcataaaaaagccgggcactgtatcagtgtccggcaagtttgacgagaagctgggccaaatgctgtttttcattgtcatccgcaatgtcccacagttcttgtaagagtttttcttccgcattgcggggctcctcgtgtttggcgagatagtccccgaggatggcggcgcttttgatgattttgctgtcatccagacccagtttttttccggcggaaattttctgatgaaggtacgccttaaattcctcgaaatcctctaaaatctgctgtttcgttacgccgtgcatggcgtgtatttcgttttcgattttgattttttctttatcttttttcatgcgtctccctccttcgggttagttgttgtatacctgtttggaagggagatgaaacattacaatgcagttaaaataatcggtttgtcttttgtgatcacgatggtgtgttccacttgggcgacaaggcttttatccggcgttttatacgtccagccgtctcccgtttcaacaatcgtttccgctttcgtggaaataaacggctcaagcgcgatcacggttccgtttttaagaagcgcgttatcaaacggatcgtagtaattcatgatgtggttcggcgcttcatggaggtttctgccgattccgtggcccgtcagcgttttaatgacggtaaatccgttggagcgggcttcatggtagacggctctgccgatctggttttggcgtttgccggcttttgcctgatccaatcctttctgaaatgcggatgctgcgcagttacaaagcttttgcagacgttcatcgccttctccgagtacaaatgaaattcccgtatcggaataaaaaccgccgaactccgccgaaatatcgatattgacaagatctccggcttttaagattttagaggcgctcggaatgccgtgagcgacttcgtcatttacgctgatacatgtcacgcccgggaaatcgtattccttctccggagcggaagcggctccgtgctcgtcaagcaccgcctttccgatcaggtcaagatctttcgtgctcatgccgggctcggcttttttcttcatttcttcacgcgccagcgcgacaattctgccgatttttttaaggccttctaattcttgatcgttcgttacaatcattgtcattcccgctttctatttttaatcatctgattcaagcttaccacaactggtttataaatagaaaaccaacaagccttatgtgaataaatgaaggaaaattggtatagatcactagataacttatgtggtatatttaagaaaaaagaagggggatgggtaaaatgcttcaatttttgcaaaaactaggaaaatcatttatgcttccgattgccgttctgcccgccgttggtattattttggccatcggcagagaggacttattaaatattccgttcatttacgcggcggggaccgcggtatttgatcatctgccgctgattttcgcgatcggaatcgcgatcgggatttccaaagacagcaacggggccgccgctctgtcgggagcaatttcttatatcatgctggacgcggctgtaaaatcaatcaattcgacaaataatatggccgttttcggagggattatcgcggggttaattgcgggatacacgtataatcgctttaaggatacgaagctgcccgaatatctcgggtttttcagcgggcgcaggctcgttccgattgtaacggcgctgattaccattattttggcggggatcttcggatttgtgtggccgccgattcagtcggtgattacgtctttcggggaatggatgatcgggcttggcggaatcggcgcggggatttacgggatttttaaccggcttttgattccgttcggtcttcatcatgtgctgaataatattttttggttccaatttggcgattttcacggaaaaacgggagatctggcccgcttctttgcgaaggatccgacggcgggaacttatatgacgggatttttcccgattatgatgttcgggcttccggccgcatgtctggcaatgattgccgcggctaagccaagtaagcgcaaagcgacggccggaatgatgatcggtctcgcgctgacggcatttattaccggaattacagagccgattgaatttgcatttatgtttttatcaccgcttttgtacggggttcatgctatattaaccgggttctctttatttatcgtgaatgttctcggaatcaggtcaggtttttcattctcggcgggggcgatcgattatctcctcagctacggcattgccgaaaaaccgcttttgctgctcgttgtcgggctttgttatgcggtgatctattttgtcgtcttctatatgctcatcaaaacgttaaacttgaaaacgccgggacgggaagatgatgaggaagaggaagaagtgcttagtgaagatacggccggttccgtcgaagaacatgccatgctcaaggggctcggcggcaggcaaaacctcgaaacgattgatcactgtgcgacccgcctcaggctgaccatgcaggatacgtctctcattaatgaggcggcgcttaaaaaagcgggagcaaaaggggttatcaaaacggggaataaaactgcgcaggtcattatcgggccgaacgtcgaatttgtcgcggaagagctgagggaagccgtccgccgtgacgaccagaagcagacttgaaaaatccggatcacctaggtgatccggatttttttttgaacatatatcaagtttcacataatgtacaaaaaacaacgttttcttctatgttaagattcatgtagaacaagtatggagatgatgtaaggtgacatggattgcagttgtttcaattgttgtcataagcctgattaagattgtgctgacatgccttcctaccggagcggtggaatggattctccgcaagtttgaaacccattcgaagctcagtgacgcgtccgctgccgtttccctcggcggaaaacgtctggaaggcgaagacaaacgccgggtgattgatgattttaacgaagccgtgtttatcgaacggcattatatatacccaggggatgaagagcgttatcttcatccgcaaaacggagccgatccgcttgtcattaagacgagaaaaggaaaaaaagatatgacggtgtttgtatacagctacgaagaccatgtagatgtcgtcaaacagcagaaaaagaaagtcgtcgcttattcagttctttccgacagcctgcaaaagcgctctatggccgccgccgggagctgaacataaaaaagccagatcattgatatgatctggcttttgtttattctttttgatcatctgctgaggaatcttcacgcttcgtataatcgaattgtgaagggtccactttcttaaagcctttcggctgatagaaacgaagcagatcgccgttgatgatcttatcagacatttcaagctcagtcttgacgagagagtcttcttttttgtcgacttctgaatcatctaaaagtcttccggttttcgtatcgtaatacttgccggacactttcgtatagttcggcgagatgaagtctccgttacggaacggaatgacttctctgtgctctttcgataagatatctgaacctgacatgagataatctttcgtatcgacgccgagcagatgaagaacggtcggcgcgacatcgacttcaccggcaaatttatgattgcggccgcctttcacgccgggagcgtggataaagagcggcacccgctgaagctgggcattgtcgtattcattgatctcatctttgccgagcactttcgccatcgctttattatggttttcggagatgccgtagtggtctccgtacatcacgataatcgacttatcgtacaggccgtcttttttcaggtcatgaaagaactgttcgattgattcatccagatagttcgcggactggaagtaattattgacgactgaatcgccaaagtctcccgccgggaagtccgtgtcttctttatccatcccgaacgggaagtggtttgacagcgtaatgaacttcgtatagaacggctgcggcaggctctttaagagcggcatggattctttgaaatacggtttgtctttcatgccgtagtttttcgtgttttcttcgctcatgtcataataagcggaatcaaaaaacttatcgatgccttccgctttgtacatttcgttacggttccagaaagtctgcgtatttccgtggaaagcggcagacgtgtactttttgccttttaggatcgcaggaacggactgcagcgtgttttgcgctttattgacgaaaaccgaaccttgcgacagcgggtacagagagttctccatcataaattccgcatcagatgttttaccttgtcccgtttggtggaaaaagttatcaaagtagaatgtttgattatcgtgcgccagtttgtttaaaaacggcgtcacttccttgccgttaattttatagtcaatgataaaggattgcagagactctaatgagacgtagatgacgttttttccttcggcttttccgaagtagacgttgttcggcacgtcatagttggccttcatatagttttccacatccgttacatcgcttgaatcggcaagcgcgcgctggctgtttgatttcacattctgcacggcatcgtaaatcgtaaagttgtacgtgcccaagtatttcaccagatagtttcggtcaaatgagcgtgtcaaaagctcaggacggtcggattccgcgacggcgaggttgatcaggaacataagcacggcggaagccaaaacgattctgaatgatttcttcgccggtttttcagccggttttttcatcttaagggccaaaataatcaaaatgacggtatccaggaagtagaaggcgtctgtccatctcattaacgagaacgcgctgtctccgagctggccgccgtttgtctttgcctgcatcatgaccgggatggtaatgaaatcattaaagaatctataatagacgatgtttgcaaaaagcaaaaaagacaataaaaaatgaatcacaataatggctgtctgctgtaattttttcttgaaaagaagcccaagtccaagaaagaacaagctggagctcagcggattcacaaaaagcaatattttctggatcgtgttgtctatgccgaggttaaagtttaaaatataagcgacatatgttttcacccacaataacacgaccgctatcaagaagaaggcaagtcctctttcttttataaatgttttcattgttacactccttttttccgatcacggtttacacggaacgatagaaaaaacgaacgtaatcaatataccatgaaaccagcaaatagaaaaggtggaaaaggctcatcggaaaaagggcgaaaaacgctgtcgcaacggcggttgatctgttgaatgacagctttaaaacatataaatggaacaaactgggacctatgtttccgtatgatcacacccggtttctattgaaaaaagaggtgaacagtaatggatattgcccatatcgtggctgaagataaaatcaagcgcgccattaaggatggagagttcgccggcatcaaaggaatgggaaagcccctgccgaaagacgatgccgcacatcttccagaatcgctcagaatgggctaccgcatattaaaaaacgccgggatcgccgaggatgaaggcgcgctgaagaaagagctgatgacgctcgattatttgatcgccaagtgccgcaatgaacaggagcgggatcacctgcggaacaaacggacggaaaaacaagtcagactcgacaaactgacggaggagaaagccatgttctcaaaacccgcatcttctcattataaggagaaagtgtacagacggctgggccgcccgtaagccggctctttagatttttttctgaaaaggaatgtgctccataaggcgcgggtaggaaatgtggagcaggccgtttacgcactgcgcctgtaacaggcggggctcagccggttcaggaagctcaatcgtctcatcgatttccccgtaataccggttttggcagacgcccatgttctttggaaaaaggggtgtgatgtttcctcttatatgcagccgtgttcttgacagcagccccaatgtcaattcttcttcgtaaacgccgggcatttccacaatgacaaatgtgtgctgttcatcctgataaatatcataagtcagggtgtttttttgtaaggagaaaaaatcttcgggagatttccgtttcaggacattggtccaaaagtcgctgggcttgtgctcgttcgtaatctcaagccactttctcattttttcgatatccacttcggcagaacctccctatatttgatttgcgatcggcattgacgggttggcgatctgatcctggtcgctcacgtcagggtcaagatggcccgaattcaaacatccggcggccggcgaaaaatcccctaaagaaaagttcgcgccgacaagtttgctgttggcggtgtggctgttttgtacggtctgaccgatatcgacgtttccgttttgcgttgctccgtttacttttatattgacgacgttaatttggtaaggcattcataaaaacccctttaatctatagtgggcggtatcggcataacatttgcggtatctgcgtttccgatttctgtctggtcgttgacatcaggatcatttaacaagttctccatcatcgattctataggtgacgtatcgccgaatgaagagttcagtccttgtgatttgttatttgtggtgggactgttgtatgccgcttccccaatcgtaatagatccgttgccagaaatactgttaatcttcaaatagtacaggttgataacagtggatggcatctcttcacacctctttaacttagttgtacagtactgtatgctttttgtgctcctgttgtgaattccgcccggacatgttcccgataaaacaagaagtcaaggcccggttccggcggggctttttttgtttcagggtctttcgcagtatatttgtgatgaaagcgctataaaaatagattgacgacatgtatatacatcattacaatagagtcataaacatgtatatacaagtttgcgagacaaaatgaaaacggttacggaggggttggcatgggtgagtttaaccgggctgcgcggcagatcgctgaagctgtcggcggaatcgaaaatattgaggcggcgactcattgtgtgacgcgtttgcggtttgcattaatagatgaaaccaaagtaaaccaaaaaatgcttgatgcaatagacattgtcaaaggatcttttgcggtaaacgggcagtttcaagtcgtgatcgggcaggggacggtcaacaaagtatatgcggaattagtgaaggaaacggggatgggtgaagcgtccaaggatgacgtgaagaaagcggcagcgcaaaacatgaatcctttacagcgtgctgtgaaaacgcttgcagacatctttattccgatcttgccggcgatcgtcacggctggacttttaatgggtctgaacaatatcttaacggcggaaggcattttctacagcgccaaatcgattgtccaagtgtatccgcaatgggcggatctcgccaatatgattaatctgatcgcggggacggctttcgcttttctgccggctttaatcggctggtcggcagtgaagcggttcggaggaagcccgcttttgggcatcgtgctcgggctgatgctggtgcatcctgatctgttaaacgcatggggctacggggctgccgagcagagcggcgatattccggtgtggaacctgttcggccttgaggtgcagaaagtcgggtatcaaggtcaggtgctcccgattctgctggcgtcttatttacttgccaggcttgagctctttttgacgaaacggacgccggagggtattcagctgttggtcgtcgcgccggtgacgcttttggtcatcggttttctatcctttgtcatcatcggtccgattacctttgcgatcggtaacgcgctgacggcgggattgattgccgttttcggccaattctccgccatcggaggcctgctgtacggagggctgtattcggcgcttgtgatcacggggatgcaccatacgtttctcgcggtcgatcttcaattaatcggatcaaagctcggcggcacatttttatggccgatgctcgcattgtcaaatatcgctcaaggatcggcggctttggccatgatgctgatcacaaaagataaaaaacagcgggggctttcactgacggccggcatttccgcatatttgggcattaccgaaccggcgattttcggcgtgaatctgcgttacaaatttccgtttgtgatcgccatgatcagttcgggaatcgcggggatgttcatctccgtcaaaggcgttctcgcaagctcagtcggagttggcggcgtgccggggatcttctccattatgagtcggtactggggtccgtttgcgatcggaatgctgatcgtgctgattctcccgtttgcgggaacatacgggtatgcgcggctgaaacggcaaaaatagaaaacctgcggggcgccttctatcaggctgtcccttttccctttcaattcaaaacaatacaggcggtgaagaaaaatgaaaaaagacagcacaccatggtggaaaaaggcagtggtatatcaaatttatccgaagagctttaatgatacgacgggaaacgggatcggtgatctgaacggcattatcgagaagcttgattatttgcagaagcttttgattgatgtcatttggcttacgccgatttacgattcgccgcagaatgacaacggttatgacattcgcgattactgcaccatttatgaagaatacggaacgatggaggattttgaacgccttctcgctgaagcgcacaaaagaggaatcaaggtcgtcatggatcttgtcgtaaaccatacatcagtcgagcatcggtggttcaaagaagcggtctcgtcacccgacagtccgtatcgggatttttacatttggaaagacggaaaggaagacggccgggcgccgaacaactgggaatcaaaattcggcggttccgcttgggagctcgacccggcgtcaggccagcactatctgcatttatttgatgtgtcgcaggccgatttgaactgggaaaatgaagagatgagaaaaaaggtctacgacatgatgcatttttggttccggaaagggatcgacggcttccggctggatgtgatcaacctcatttctaaagaccaatcgtttcctgatgccgaggatgggcgtgacgggcgcccttattatacggacgggccgcgcgcgcacgaatttcttcatgagatgaaccgggaagtgttttcgaaatatgacagtatgacggtcggggaaatgtcctcgacaacggctgaccactgcatccggtacacaaaccctgagaataaagaactcgatatgacctttaactttcatcatttaaaagtggattatccgaatggtgaaaaatgggcgctcgctccgtttgattttctgaagctgaaacggattttagcgttttggcagacggagatgcaaaaaggcggaggctggaacgcattattctggtgcaaccatgaccagccgcgggccgtatccagatacggagacgacggcgtataccggacgaaatcagccaaaatgctggcggcggccattcatatgatgcagggcacgccttacatttatcaaggtgaggagatcggcatgggcaatccgaagttcgatgacatcggctcataccgcgatgtcgaatcactgaacatttacaaaaagatgaaggaagaaggcgtgcccgaaaaagacattatcgccattttaaaagagaaatcaagagacaatgcaagaacccccattcagtggaacagcgggccgcacggcggtttcacgacgggcacgccttggattccggcggcggatgattatcgggacattaacgcggaagcggctttgcgggacccggattcaattttctaccattatcagaagctcatcaagctcagaaaggaatatgacatcgtgactgaaggaacgtttgagctgcttgctgaagacgatccggcagttctggcgtacgtcagacacggcaaggatgaaaaactgctgtgcatcaacaatttctacgggaaagaagcggactttacggttccgcttaaagacacggacggctggcggtttacggtgctgctgacgaatgatgaaccgagggaagggcggccggaacgattgacgctccgtccgtatgaatcgatcgtttatcatctgacaaaagcgtgatacactaatctgggtggtcaaatgaaagtgaataaatacatcacaatctataaagatatggtgcggcagatcgaaagcggccagcggaaggctgaagacgttcttccgtctgaaaatgatttgtgcgatcaatacggcacatcacgagaaaccgtccgcaaagcgctcaatatgctggcgcaaaacggctacatccagaaaatcaaaggcaaaggctccgtcatattagacagagaaaaaatgcgttttcccgtctcaggcctgatcagcttcaaagagctttcggaaacgctcggaaaagagacgagaacgacggttcaccgtctcgggctgatcctgcctccctcagaagccgcaaaagagcttggtacagaagcggatgaaaaggtgtgggaagtcgtcagatcaagacggattgacggagaacatattattttggacaaggattactttgtgaaaaaacacgtgcctctattgacaaaggcgatttgtgaagattcgatctatgagtatctcgaaggagagctcggcttgtccatcagctacgcgcaaaaggaaattgtcgtggagccggcgggggaagaggaccggaagtatttggatcttggcggattcagccatatggcggtcgtgaaaaacagcgtctttttggaggataccagcctctttcagtacacggaaagccggcacaggctcgataaattccgtttcgtcgactttgcgagaagagaaaaataaaaacggactgccgcggcagcccattttttttgtcagtatcaaaatgaatactatccaacaaaaatgtgcgtactggtactttcaaaaataatggctacaatagtacataacgattgaaaaggagagatcaccaatgtcagataaaaaacagcagatcatcgaagcgtatcaattcagacacgccacaaaggaatttgatcctgagaaaaaaatttcagaaagcgattttgaattcattttagaaacgggaagattatcgccaagctcgctcggtttggagccttggaaatttgtcgtcgttcaaaatccggagcttcgtgaaaaactccgcgagttcacatggggcgcgcaaaagcagctgccgaccgcaagccatttcgtacttctgcttgcccggacggcaaaggatatccgttttgacgccgactatgtcaaaaatcacttgcgggaagtcaaaaaaatgccggaagatatgtatgaaggctatatcagcaaaacggaagacttccagaaaaatgatttcaatctgcttgaatcagatcgcgcgctgtttgactgggcatccaaacagacttacatcgccctcggcaatatgatgacagccgctgcgcagatcggaatcgactcctgccctgtagaaggcttcaactacaaagaaattcaccggattcttgaagaagaaggacttctggaaaacggaagtttcgacatctctgttatggccgcattcggctaccgtgtcagagacccgcgcccgaaaacaagatctgcctcaaaagacgttgtaaagtgggtataagataaaaaaagctgccgggcgtgtcccggcagcttttaacgtttatttggttttgctaaaaaacaggcggtgatccaggacgtaacgggaatgatgatgccgatcccgattccggcgcaaagaatggtgacggcttccgcactgaatacttttgagttcactattttttcagctgagtatgataagtctttaaaccagataattaaagccaaatagctgccgaaaaaagcaaagaataacgtattcgtattcgttcctaaaatatctctcccgatgcttaatccgaatgtgtacagatcttttctgctcatggacggattatgactgtaaatttcccgcatgggtgaagtaatggaaatcgcgacatcggtaatcgccccaatcgtgcccatgatgatcatggctgcggtaaccttcacaaaatccaccccgacaaacagtgtgaatatgccgatatcacccaattcttcttcaccgaatccctgaatcgaagtatgttttgttacggacataataaaaaacagcagcagtacaatcgtcagcattgcagaaataaaggcggttacggttttgacgtttcctccattaatataaaaaagagtaatgctgcagatcacggcggaagagagcaatgttaaaacaatcggattgatatgcgggtctgtcatgaaaatgatggtgagaaagagaactccgaaatttaagaataacgcaataaaagacctcgctcctttttttccgccgatgatgaccattaatagaaataaaatcgccgcgagaattacgatgacattcatgagcttgccttctttcgtttaataaaaaagatagaagcatacagactggcgggtatggctaatacgattccgatccctccggccaatgctctggctatttccaaggaaatgttcatagaaagagtgaatcctatcggggaatcatttttcaaatacaaaagcatcatcggaatagagccgcttatataagcaaaaaacagaatattggtcatcgcccccatgatgtcttttccgatctccatcccggaacgtctgagagcttgtaatgagatacccttgttttcttcatataatccgaagacagatgatgtcatggtaatggctacatccatgaccgctcccagtgatccgataaataccccggccatgaacaccgtgtgataagggcgggttaaatactgcatttcctcatatctgagacctttctctccggttgccagcatcaccagatacgtaatcagcagggaaacgaaagtgcctgcgagcgtcgcggcaatggcggcgtatgttttcgcgtgaaaaccgctgacaagcagcaatgagataacagtaaagatgagaatacagataccgcagatgaaaattaaccctatattaggatgcttcctgtacaaatctaatgcaaacgacagtaaaacggcattaaacatcaggctgacgatcgaaaagaagccttgtttttttccgacgataagcaaggtgaagatgaaaacccaagcgatcagcaaaagctgtttatcccgttttttatctataatgcttcccgatatatccttgtttgatggtttccctttatcaatagaaacgaatacttcatcgccaatcgaatatttctgatcattcgctccggatgatgaatactgattggacaaatgaatgagctgtcctttctgactgccgttttcaagtcgggcagtgatcgtctgactgaaaatcttatctttgtttttatgcatgtcctgtacgtcagactgatgttccaatgttgttttcgtcactttggcaatcggccgctcataaaaagaagcgttgtgagtgacgaaaatgagcgagctgataaaacagagcgctgttatcacgtaaaacagctttttcttgtaagacatgcggtttcgtttgtttcctgttatcttcaaaaaaagtcctccaaacaggcggcgccgtgtgaaagagaggccctgccgtgaagtgttaaacgatgcggatgcagtctttcgcgaataacggtcatattttatcattcggccgtacggctgtcgactcagaaggggaccgagagaaaaagctcccctgatttcagatcaggagagctcttgggatgaaccgcacgataaaagcggtctttttatgcttcgttcactttttttgcttttcttctttgatgcagatacagtgccgttccgagcgcgctgatgagtaacccggcaagaaggatggaatacatcgtcgtggccgtatcaggaagcaggccgcccggcgataccccgtcctgtgcagggccggatgacggtttttgtccgcttggctgctttccggagccgtggtctccgcttgtcggcggcgcgctcttcgtgtttgcgtttaatatggtgtattcactgaaatgatttgtatagcccgtgacgagatcgtgtgaaaccgaaccgttgtctgtttttgtatagacgttctttttccggtctacatggtaaatgccgggctgtttcgcctttttcgtattctcaatgcgcagggtgagctttaccggcgctttgaatgttttgatgtctttgtttttctgcttcattgtaaagtcgtatacatttgaaagcgccccgcttacttttcctttcggcgtcacgccgaatcgtgtatcagctgaagcagcgtttgccatcggcattttcatgctgaacttgtcatgcaggatcgtaagggaagaatccgatgttctgtcctttaacaggctgatttgtttttttgtcacgctgagatcaatcggctttttggcgccgtcattcttatcgtaatacacgatcggcgtgttggcgtttttggcataaacggcaaatgcgctgtcatcttcaagcgtccacgaaccgtttttttgtttcgtcggcaggtacacttcctgcgcgcggccgtcaactttcggttccaccgcttttcccgctttttcaagctgctcggtgaagacctcatagtcgacaaagccaaggtcttctttatgggacgcttcgttaaagacggaatatccgtctccgccttcaccgacaaagttactggtggcgactctgtatgtcttcttatcagaaatcggctttacgctgccgtcatcctgtacggccgcagcttgaagaacgcggtgtcccggctttttattcagtgtaaacgtgtatgttaaaccggcaacttgagggaaggcgccgccttgagcctcaattccgcttaacccttgttccaaggcttgtttgatctgtttgccggttaaatccgcgacgtaaagcgtgttgccgaacggcattacattcagcacatcgccgagtgtgatgtctcctttatcaatgcccgcgcggatgccgcccccgtttgtgatcgcgatttgggcgccggccgcttccttcgctttttgcagcatgccgtccgcgatgaagtttccgagattggtttctttggagcggacatgctcgcgctggccgtcaagtgcgaccttcgttgagccgactttttcatttttgactgagacgagctcttttttaaacggatcaagctcttttttcagacccgggtcttctttcgtctgctcgttcaccggcagcgcttgaagagaggattgttccggcagaacgacgccgtttttgtcaaatgcgacatcgacacggcctaaatattcgccgtattcttttgcctgagcgacgatggtcggctcttcgtttttaacaatttccattttatctacaagcgtatgcgtatgtccgccgacgattaagtcgatgccttttacttttttggcaagatcgagatcacgctgatgcccgatatgggtcagggcgataattttattgacatgttctttgttctttatttcttttaccgtatcttgtgcggattggaaggcatcatgaaagacaatgctttttcccgggcttgatgtgacggacgtatcttctgtcgttaagccgaatacggcgactttttctccgtttacatcaagcagaatatatggatagatgcctgcttttttctttttccctgccgtaaatgtgtctgcttttttcatgaatggtctgagttttgactctttggacacatcgacatttgagctgacgagcgggaagtcaggcgcttggaaatcgtattttccggacgggtcagccgcgctcccgttaccgctcaggaagctggcgagagcacccggtcctttatcaaactcatgatttccgaaggtcattgcgtcgtagcccatgctgttcatcaattttaaatcagccagcccctgccactttgtgaaatagagatcgcctgaaaaaacgtctcccgcatccagtaaaatgctgcggtcggtttcgcttctgattttcttgattttcgtcatccgcctcgccgcgttatcaaggtgggcgtgcgtgtcgtttgtatgcataacggtgagtttccatgcatcatctttcggcggatctgtgcccggttcatcatctttgaattggagcttgtactgtccgtagcccgcgttttgtgattcaccgatataggcgacgtcatctgcgcggtcggcaaacggctttgcggccaaggaagattcaaatgtcaggtttgtccctttgaccggaaggatggaccagttatgatcagcctgcggattaatcgttttctgctgtatgatgtaatccattaagacctgcctgttctcatcggctgatgaatatacgattttatcattgcttaagtgagggaatcctccgccgcctgaagcgcggtaattatttgtgacgatcagaaattcctgcttggcgctgacgggctttccttgataagaaaggttgacgatccggcttgcatcgggatgaatgactgttccgttttcgttgtatttcgccggttttgtgacatcgacctgataggtgacaccgtcaatgacatcaaaattgtatgagcggtaggcatcatttaaaagcgcttggctgccgccttttgcctgatcgatctgattaaattgccccgcggacatttcgagccagtccttcacttcgcttccgttcagcttgacgatctgaaccgtgttgtcatacaggtacaaatcgccgatatttttgatggcgaggtcgcctgcggaaatgtttgtatagtagtttgagccgttccgcccgccggctttaaacggggcgcccgccgagaggataggcagatctttgtattccgtatccttcatcttattttcggcgtaccatttttgcgcatccgttacgatttgaatggacggatcatctttgacttgggcgaagaaactgttgatatcggcttttgtctggccgacgggttctctgatgtatttcaaagtgccttcgtgcgcttttttgacggtattgacgacggtttcgttttccgacgtcacattgccggcaatcggctcgatgctgccttttgcatcttccacatgccacgcgctgtctgtttttttaagccggaggtcgatgacgcccgcatatttgccccagctgcttgacataacaacggggatgccgttaatcgtgcctttatcgacgtcgaattgatcagcgcctttgtattcggcatcagggaaaagcccgtgctgatggccggatacgatcgcgtcaattccggcgactttcgttgccaggtcaaaaacggcgttttccgctccggaagactgcgcttttttttcgatgccgctgtgggcgagggcgatgacgatatcggctccttcagctttcattttcggaacggttttctttgcggattccacaatgtcttcgacctgaacgtggccttcgagatttttcttatcccacgtcatgatttggggaggaacaaagccgatgtagccgacttttatctgatgcttgccgcctttttcatccgtgacggttttgtcttttatgacataaggcgtataacggttttcgccgcttaatgttttcacattggcgttgacgatcggataatcagcgcctttgattgtcccgtccagaaattcaagcccgtaattaaattcatgattgccgagtgttcctgcgtcataatgcagactgttcatcacttcaatgatcggatgggtctttgcgcctgaaatgatatcatttttctcatattttacggcgtattctccgaggggattcccctgaatcaggtctccgttatcgacaagcagcgtattcgggttttcgcgcctgtgcttctcaataagctgagccgttctggccagcccgaattccgttgtcggtttgtcgctgtagtaatcgtagtccatcatgttagcgtgaacgtcagttgtggctaaaatgctgagattcacactggaggatttgttttcttctgctttaatgggtgatgttgggaggattagactaagtatcataactaggggcagcagaatacggagtgtcatattgacgctgcatcgtcttttctgtattctcacctgttctccacctttcaacaaattttgtcatgcagtaccattgtaagaatattttgtgaaagttcatatagatttcatgatgattcttgtaaaaagatgaaaaatgaggataatgacctatgtaaaacggatgagcggcaaacgcgttacctatgtttgatgttagtgtggctggggtacatagatttatgtagacttcatcaagcaggaggtagtaactatgggtaaaaaaattgcagttgtattaacggattattttgaggatgtcgagtatactgaacctgcgaaagcttttaaagatgcaggtcatgaattaaccgtaattgaacaggaaaaaggaaaaacagtcaaaggcaaacaaggggaagcggaagtgaaagtggacgcgtccatcgatgatgtgaatccgaaagactttgacgcattgctgatcccgggcggattctctcctgacatgctgcgtgcggatgaccgtttcgtccaatttgccaaagcgtttatggatgataaaaaaccggtgttcgccatctgccacggacctcagcttcttatcaacgcgaaagcattggacgggcgcaaagcgacaggatttacttctatccgaatcgacatggaaaacgcgggcgcgaatgtggtggatgaagaagttgtcgtctgtcagaaccagctggtcacaagccgcacaccggatgacattccggcattcaaccgcgaatcattaaaactgcttgcgtaatataaaagcggagcgccgtatcaggcgttccgctttttttgtgaagattcccggatgaccagctcaggcgccagaataatgcgttgttttttgtgctgggaattggtgattttatgatgcagcaattgagccgcttcttttcccgactgccgcggaaaggaagaaacggttgtaagcgggggataagaaatttcagcttccggcacgttatcaaagccgacaatgtcaatatcttcgcccggaatgagcccggcttttctgatcccttgcatgacgccgaacgcgaccaaatcactgaagcagaaaatcgcggtcgggcgctcagaccggcggaggagctccgtcacggcttcacagcctgcttcgcgggtcggcgtgctgtcaatgacatagtcattttttacttccagatccgcttcacggagcgcttttttaaaccctttcatacgtttcgtccatgttgacgagtgcttcacgccgcccagaaacgcaatctcctgatggcctttctcaatgaaatgacgcactgccttataggtgccttcctcataatcggctccgacaaaatcacagtcggcatcggcaatctccctgacggcgagcacgaccggaatgtcaagctgctcaaggcgggaaagggtttcctcagccgtacctgaaaccggacacaaaatcaatccgcctaccctgtgctccagcatggtcgagatcagctgctcctgcttggcgacggaatcaaatgtcgtgcctaacagcaccgttaatccgacttcctcaagcgtattctgaacgccgatcagaaactctgagaaaaacgtattggaaatgtcagtgataatcaatcctaccgttgtggacgtctgtgatcgtaaattcgcggcaacccgatcatatacgtaccccagctcccgcatggattgcagcactttctcacgggtcgcttcggaaattcggggattattgcggacaattaatgaagcggtggatgttgagacgccggcatgctcagcgacctgctgcaatgtcacccggcgttttttttgctgtttcatacgtcgcattcctcacttggtttttattcgttacatccattataagcgttttggaggctgagaagaaagagagagggggagaaaatgataaagcgccggaagacggattgtccttcggcgcttctgtcacaataggttattcaaacatttgctctttaatatactgaaccggcatttcacggcctgtccaatattcaaacgccatggcgccctgccaaagcatcatgccgaggccgttaatggtgttgcagccggccgcttgagcttgttcaagcaatttcgacgtcacggggttgtaaacgacgtctgtcacaatcaaatcaggacggagcatggatgtatcttcaatgacgctcaagccttcaagcggtttcataccgacacccgttccgtttgtgaaaatatcgcttgaagcgatttcagcacgcagcgcatcttgatcttcgagcgggaagactttcgctttgcaagaagatcccttcatttcttcattgatgatgcggacgttttcttccgctttttcgaaaaacgcgtcattgcgggcgaaaatagagatttctccgaggccttccaatgcggattgaatcgctatcggagtggcggccccgccggaaccgaccagcgtcatttttttgcctgtgatattgatgccgtgttcttttaagttgcggacgtatcccataccgtcagtggagtgtccgatcagtttgccgttttcattaacgactgtattcaccgcgccggtgaatttcgctgaatccgcgagttcatcgaggtaagggagaatgttcatcttgttcggcatcgagacattgaatcctctgacgtttaaggcgcgcattcccgttaccacatcttccagctgttcattgccgacttcaaacgcgaggtaagcgtagttcaatcctaattttttaaacgccaggttgtgcatcgccggagataaagagtgtccgatcggtgtcgcgaataatccgataagctgagtttttccgttaatccgtcctaattctttcttcatgatgtattcctccgtaagtccattcatttgtttttcatcccgctttgagggcagaaaaacgctgattacatatgtttatttaaaatgctgagtacgctgcgcaattcttcaacgggaatctgtccgggcgctgatgcttctttgcccgctccgaacgtgcacgctgagccgaagacttcgccggccaggcggctgatcaggcctgtccccgccattgacattgtgatgatcggccggtccgcgtattgtgttttcatcgtgtgagtggcatccaataagacgaaaacatcttcagtgctttgcggcatcaccgcgattttcggaatgtgcgcgccgtacgcctgcatgttccgcagccgggaaatgatttcttcttttttcggtgtctgatgaaaatcatgattggacatgacgacatatacgccgttgtcttcagcggttttcacaattgatttgacttccgcttctcccgtaaacaactcaacgtccacaaggtcaatgtgttttgtttcgatggcggttttaagcaattcaatgtaaaagcgatcatcaataactttatttccgccttctttatgagttctgaatgtgaaaagcagcggtgttgcgcctgcggctttccgcagcttttcaagcatgctttttacggcgttcaggctgtcaacgtgctcgtacacatccgcccgccactcaatgatatccgggcgaagcctgttgacggcttcaatttcttcgagcagttctttctctccggccgccatcagcggcacaatgatcttcggaagcccttcgccgatgaccgtgtttctgatcgtgatagattgcatgataaatcctctcccttaaaaaatagtcaggctttcatcacttgcttaaagcggattccgataaacaatgcgagaagggcgctgacggccgcaattccgatatcaagcagaaaaacaggcgtcaggccggccgctttggatatcgctcccgttacaagcggaatgacaataaaagataagcttgatgctatattaacaaaagatgtgatcgtacctttatttttagggaataaaacagccataaccgtcatcgccaattgcagaatgcccgcagttgaaagtccgatgacaaaggagctgatgaccgatacggccggctgatgaatgaaaatcagagcaagcagcgcgattgccgcgatcacagggtacagcaccattaccgtaatcggctgaatcactctgtttaacagcacagccagcaataatacggatacaagcgccccgatgctgtaatagctcaacaatttgacggcctgcacctcaggcatgcccaaaacggtttgcccgaacttaggaagccatacttgaacgagcataaacagcgccgtagatgaaaagcctaacagaatgatcgcaagaccttcgcgccatatcgacggctgtgatgtgaacgcgtcatcagacggagaggcttccgtccggccgccgtcttctttttgcttatgattcggaaacggaacttttaacaggaaaaagccgttcaggaagaaaataatgcccggtacgaaaaacgtccagccgtaaaacaaatgcctgtccgcaataaacgcgataaaaaacggaagcaccgtcgcaccgatggatacaaacgctttgattaacacggttgcagagcttgcgtttttcggaaatccttcaataagcgccggatatgtcccggaatccaaaaaggaattggcgatcccggcgaaaatggcgaagataaacgcggccgtgtagtttgtcgaaagcggaattccgattaggaaaatcagatacagaaaggcgcccgacacgataaacggccgtctcccgaatgtatccgaaagcttcccggcaaacagaagcgaaatcagctttccgatcccgatggcggagaccaaatagctgaccccggctgcggatgtatgaagctgttttgataatgcctccatattggatgcgataataatattgatcatgcccagcaggaaatagttaatataaagacccgctgccattttggtgtatatgtttttcatgatgacatcccctaatgcggttaataaagaattaaattattttttaaattgataagcgcagatccattcccctttattgaaccactgcctttctttgaaaactgtttgataaaacggctgctgagacaaacttgaataacgctgatatcacaatgagtatatcgttctactaaataaaaaaagataagcggcccgctcatttagtatatcgttctaccaagttcacagttactatactccttctttttatatgtgtcaaaccgatgaacttttattttttacttttttaaatcaaaaaagacccgccgtttttcggcaggtctgacatgggtttattttctgagagaggcgagctcctcggcaatggcctgcatttcactcgggctgaatgatgcttttttcatcaccatttgatgaaggtatgtaagatcttctattttttcatcactgaaatcttccgctctgatgacaccgacattgagcatgttgagcttttgcgaaatgtcttcaatcattttgtttaacgtttctgtttgttggctcggcaaattcatgcatcctttcatgaccgttttcgtaccctttattctaacagaattcatttagaataaaagcttatttccacagccgcagaaaagttgctaagatgatgataaggtttttgatcctcaaaatgcggggaaagaatagggaggttattgatatgatacatgtgctgtttgtctgtctgggaaatatttgccggtcgcctatggcagaggcggtattttctgatatggtgaagaaaaacgggctgaacgggcagattaacattgattcagcgggaatcggcgcctggcatgcgggaaatccgccgcatgaagggacaaaggagatcctaaagaagaaagggatcagcgcaagcggcatcacggcgaggcaggtccgtgagtctgatctgaccgattttgattacgtcattgcgatggatgcagaaaatatcggacatctgcgcagcatggccggttataaaaaagcggcgccgcgtattgcaaggctgcttgattatgtaccggagtcggaccttgcggacgtgcccgatccgtattataccgggaatttcagcgaggtgtacgctttggtcgagtccgggtgccgtcatttgctggagacaataaagaaagaccatcacttataagggggattgaccgatgaagcagacacgcatcatggcaaaagcgattctgatcggcgctgccgccggcggagcactgtccttattacataagcccacgagagagggatgtttccggaacatggacgcgtgcaggcgccgtgcggcattttaccgaaaacatcctgaagccctgaaacagcaggcttccgcaaaacttgatcaagtgaaaatcatcgccaataccgtatcggaagatctgagttttttaaacgggcagatcaccaagctgaagcagacgacgccgcaggtcattgacctgttaaaagaaacgaaggagcatttttcgaaaaacgatcattgaggtgggatgtcatgggttttataaaagagctgtttgcaaggttttcactgcatgaaggacaaagtaaatcggcggagctggcgtattttttcctgctgtcattgtttccgttgatgattttcatgctgacgctcaccgcctatcttcccatatcggcagaagacgtgctcggggcggtcgatcaatacgcgcccgacagcgccatgtctatggtgaaatccataacggagcaaacgctgaacaagcgcagcggcgggcttttgtcattcgggattatcgccgtcatctggtcggcttcgaatggcatgaacgcgattgtcagagcatttaaccatgcctacgaagtcgaggaaaaccgctcatttatcatcattcgcctgacctcaatttttttaaccatcgcgatggtggttacgattttaatcgcactgcttctgccggtgttcggcagagaaatcggaatgctggccgcagatttcatcggcgcttccggcctgtttttgcaggtgtggtcggttgtccgctggggtatcagtccgcttatcctgttaatcgtgtttaccgcgctttacattttcgcgccgaataaaaggctttccctccgttttgtcctgccgggagccgtatttgcggcagccggctggattatcgtcagtatgctgttctcattttacgtcggcacctttgccaactacagcgccacatacgggagcatcgggggaattatcgtccttatgatctggttttaccttacgggaacactgctgattttaggaggagaaatcaacgcgcttttacataaacgtaaaaagcttcctgatgaaaatccgtaccgcgggagcaagctatagaggaacggatgacgttcaagctgaaaaacggagggaatcggctatgaccaagcatacgaaaaaaggcggaagccataataaacaaaattcaaaaaacggcccgaagaataaaacaagcggaagcgctaacgggcagaacggataccactagaaagaagccgcctgacttagatcaggcggctttttttatgaggccggaaaagaatgggattcggatgcgggactgtgctttgttttcccgaagacgagcgcaagccaaatacagaccagaatcaccgtaataaagtaaaacaaattggcgctttcaaaccgctgcatataccagccgcccgccaccgggccgatcatgctgccgaggctgaaggaaatgccgcagagcagattgcccgccggcagcagatgggacggcagcaggtcgctcatatagctgatgccgagagaaaacatactgccgaccgccattcccgccgtgaaaaagcagcagccgatgacagaaggcgacggaaacagtccggccgtcaaaaagcaaagggcacccgttaataagatgacgagcaggacacgttttctcccgaatcgatcgcttaataaaccgagagggaactggaatacaatacttccgatggcaaaagcgggcaatatcagcgcgacggcatcgactgatatgcctaaacgcagggcgtacacgggaaagcttccgttcagcgccgtttctaaaaaaccgtacccgaaagccgggagaaaagcgacccagccgaaaagaagggcgcggtaaaaccgttttgcgctattgtccccggatgtttcatccggaccttgcgccgggtactcattacgtaagacaaatacaaacagccaggcggcaagactgatacagccggatacgatgaacggaagggacggacttgttttcacaagagggaccatgaacgggccgacagcgaatccgagcccgaaggacagtccgtacagcgaaatgtttcttcctctgtttcggggcgttgactttgacgtcacccacgtttgggttgaaaaatgcagcatatgatccccgattccgataaagagccgaagaaaaaaccataaccatatggattgaagccaaataaaactgaataagctgatgataacaagaaatccgcccatgaccatcagaggtttgaacccgagcttgcgcagcggggcctccataaacggcgacgccagaagcacgccgatataaaggccggttgcgtgaagtccgtttatggctgctgattccccgttcgtttcaaaaatgacggagatcaccggcagaagcatgccttgggaaaatccggagatggaaacaagcagaaccaaaatagaagtacagtcgtgacatcgcgtatttctccttcttcagtatctttcttgatcgtacacggatttgtcgcgtccggcaacctgaaaatgccaattcgggctgccgcggaagtgtaattgagggagtttttgagaaggatataaaaagactcattcgaaaaaaggagccaggcagatatgaatcggatttttttctttacggctgcggcgggagtgccgctttcagtcatcggcggcctgatgcactggccgtcagcggttttgtttattatttattgcttgacgattattgcgcttgcaagttatatggggagagcgactgaatctcttgccattatcgcgggaccgcggatcggcggtctgctgaatgccacgttcggcaatgcggtagagctgattatatcgcttttcgccttaaaagaagggctgacgggcatcgtgcttgcttcactgaccggttcggtgctcggcaatcttctgctcgtcgcgggattgtcgttttttatcggcggtttgaaatacaagcggcaggaattcaatattcatgatgcccggcataattccggcctgctgatttttgccattatcgtagcttttgtcattcccgaagtgttttccatggatatgggggaaaaaaacaagcttgatttgagtgtcggcatcagcatcatcatgatccttttgtacgtggcggctctttatttcaagctcgtcacccaccgcggtgtttatcagccgaatcagccggaggcaaaggtagaagaggagcagcctgagtggtcggggaaaagagcgacagccgtcttatttatttcaaccattatcgtcgcctacatatctgaaaaccttgtccatacgtttcatgcggtggctgaacagttcggctggagcgagctgtttatcggggtgattatcgtcgcgatcgtcggaaatgccgcagagcatgcgtcggcgattattatggcgtacaaagacaagatggatgtcgccgttgaaatcgcggtaggctcgactttgcagatcgccatgtttgtggctccggttcttgtgatctgttccatcttttttccggtcaatatgccgcttgtattcacattgcccgagcttgtcgcgatgatctcatccgtccttttgatgacgatgatttcaaatgacggtgattcgaactggtttgagggggctacgctccttgccgcttatgtcatcatggcgatcggttttttcctgctttaacctgtaaaaaatgcggataacaacgattgcggaggaaaagactaaaggaaaatgctatagaaagagtgatatgatgagaaagctgtttcatgccacactgattctgctgttatcctttagttttttcgcaacgccgtctgccgatgcaaaaaaaccgtttaaagttcccaactctgtcgtaagcatttcaaaggaaaatacgtatccgaatgcttcacaggatcagccgatgcttcagccgagcaaactggcaaaggaattgttagatacatccgagatcaacatcgaaaatccgcatctgataaagatgctgaatgaatcctcggtttccggttcaccgcttgccatcggataccgggcgacaatatttctcgggaaatgggcgctcggctatcaatcgaacgaaacggtcgccaactgggaatataaaaaaatcaatacgaacagagcggataaccggggcgggcagcaaaccgcggttatctcatacgcccaagaacagcaatacaaaatcaaaggcgggctcactgcgaaggtgccgaacgcagaagacgtaaaaagcatgatgatgcaaaaagcgatgaagaaaacaaaactgccgctcgcgtttgaaacggttatcggcgcaggcacaaaacgcgatcaaacctacaaaatttctccgcagcggctcggctacctgcacgcctacgctccggccgttaatgaaaaaggaaaagtaacatacggtgaagtgtatttggtgctgaaaggcagcaagcggaaacttgtcgtcaaaaatgtgacttcgcaaggaatcggggcttggattccggtgcaggatcacgtcacattcggttttcaaatgacagcgcagccgagataaataaaaaaagctgattccggttcgggaatcagcttttttgtgtgtgatacatttcctcaagcaattgcacattgttgttgtacagctcccgggcaagaacgcgtctcaccgcaaggctcgccgagaagtattctgtgtcttgaaccatgcctttgacagtaaattctatgcctcttgtcaatttgttcaggctcataattccatgtacttgaaacggctccgtcgcattgagaaattcatcccgcttcagtgaatcgcgaagctcatcattgagcatgtcgcaggctttttctaagacggcatatacccgctcgggatcttccttgtaactgatcacgacggattcggtaatccgcataaaatcaatgttatagttttgaagctgtctgacctcaccgtttgaaatggtaagcagcttgccggtccactcacggatctggagggaacggagtccgatttcttcgactgtgccgttgaacagattgttaatcgtcacgtaatcgcctttatgaagctggcgttcgtatatcaaaaagacaccggccaatatgtccttgattaacgactgtgcgccgaaaccgatgacgataccggcaacacccgccccggctaaaattcggccgaaatcatgaacgaataaagaaatgacgtaaaagataaaaccgatcgtcgccgtatactgggtgatggaccggacgaggctttcaatcgttttccctttccgttcctctaagaaatccgtgcgtttaaataacacctggacaaagcggttgatcaaaaaaacaccggcgtaaagcacgagagcgacgatgatgatctcaaccactttgcttttcaaaatgtccgtaattgtcgtttccatcttctgttaacctctggcttttcgtaatgaaaaatccgtatcctgataataactgtttttgacaaggacgttcgggccgaggcaccggacgtttgtgcagcggcagttcagctctttgctcagcttcgtctgtctccacttgtcatatgcttcaggaaggctgtctgttttaatattgccgagcggcggtgtatcgccgaaatccgtgacaatgatatttccgtcaaaaatgttgacattcaggcgggagcggccgtcagggtcgtttcgcaccgtaacgttttttgcttcccgcaggcggcggaggagcttctggtcttcttcatcagggctgcatgcgtaaaacgggagcgtaccgaacagcatccatgtctcttcatcgcgaatgtcgagcagatgatgaatagcctgtctcatgtccgtcaggctgagtgattcaagcgcgctggcgaaatcactcggatacatcggatggacttcgtgccgctggcatttcatttcttccgtaatctgccggtgaatatgttcaatatgcggcagcgtccgtttgttcagcatcgtttccgctgaaaccattacgcctgcttcgacaagcgtgcggctgttttcaatcattttgtcaaaatagcgcgcccgctgttcaaatgtcggtttcttctccatcatcgcaaatccgatgtcggcaaagtcctcgaccgttccccagttgtgagaaatgtgaagaacgtccaaataaggaataatccgttcgtagcgcccgatatcaagcgtcaggtttgaattgatctgtgtacggacgccgcgttcatgcgcatattttaaaagcgggacgacgtattcctttaccgatttcagcgaaagcatcggttcgccgcccgtaatgctgatagagcgtaacagaggaatttcatcaagccgctttaataaaaggtcgatcggcagcgcattcgggtctttcggctggagcgtgtacccgacggcgcagtgctcgcatctcatattgcacaaagtcgtcgttgtgaattcaacgttcgtcagtttcatatctccatactggtcgacatccatgtacgcttcccaaggatcgtactccggtgtgatcggacgcagtgttgtgttttgtgtcatgactatctaactcctttataaatggggcatactaacgtctgccaactgttaattttagacctgatctgccaagatcgcaagtagcggaaccattgaaaaacggcaaaaaatacgctaccattataaaaaatgaatggagtggaagtatggggaatgcagtaaacagcaaagatcagcagctcgattacctgaagaacagactcgatatgtttatgaatgtcattgattcattagaccctgaatcaacggacgttgaagatatagaccggctcatcggcatgcttgatgatctggaagcaaaatacgaacgctttaaaaaggattgggaataaaccccggcggaatgccggggtttttctttttccataatgcggctgtataaaagggcagggcctactgcaaaataaggaaaaatgcagaaggagtgctggtcatgaaatggttttgttcaatttgctgcatggccgttttacttgcgggaggcatcaacagcgcagaagccgtgccgaatgaacggataaactggggctttaaacgcagcgtcaatcatcagccgccggatgccggcagacagctggacaatctggtcaaaaaatatgatgccttttatttgggcaatacgaaagaaaagaccatctatttaacgtttgataacggatatgaaaatgggtacaccccgaaagtgcttgatgtgttaaaaaaacatcacgtcacgggcactttttttgtcacaggtcattttgtgaaagagcagcctgatttgattaaacggatgtcaaaggaaggccatatcatcggcaatcattcttttcatcatcctgatctgacgacaaaaacgggcgatcagattcaagacgaactcgattccgtcacggaagctgtgtacaacattaccggaaagcgggacaacctgtatctccgtccgccgcgcggcgtattcagcgaatatgtcctcaaagaaacgaagcgcctcggctaccaaaccgttttctggtccgtcgcatttgtcgactggaaggttaacgagcaaaaagggaaacaatatgcctatgatcacatgataaagcaggcgcatcccggcgcgatctaccttcttcacaccgtttcaaaggacaattcagaagctctggacgatgccattaccgatttgaaaaaagaaggctacacgtttaaaagcattgatgacctgatgtttgagaaagaaatgaagctgccgtctttgtaacgggaagcgcctcatcatatagtcttatcttgatgcaggcgtcaaaacccttacgccataaacatcactgagatgaaacctgctcccagttaaagggggcaggtttttttgcccctctaattaagagatagttaagaaatagttaatccccagttaaaaacgcattcctatactattgtacataagcattaggaaagtaggtctggatcaatgccggaaataattaaaacgacaaatttaacaaaagtttatggaaaacaaaagtcagttgataacctcaacataacagttaatgaaggtgatatttacgggtttctggggagaaacggggcaggtaaaacaacgacaataagaatgctgctggggctgataaagcctactcatggaaagattgagatattcggtgaggatttacatacgaataagaaagacattctaaaaagaattggttcaattgtagaagtaccaggattctatggaaacctcacggctaaagaaaaccttgaaataaatgccaggatcgttggaattcacaaaaaaaatgcaattgaagaagcattagaaattgtgggattagagaatgaaaccaaaaagcttgtaggcaaatactctttaggaatgaagcaaagacttggcatcgcccgatctcttcttcactatccggaattactaatattagatgaaccgacgaatggtttagatccgattgggattaaagagatgagaaggctcattaaaacattagctgaagaaagaaaaattactctgctgatatcgagccatatcctgtctgagattgaacaattagttgatcatttgggcattattcacgagggaaaactgttagaggaaaccgaatttgatactctccggaagagaaatcgaaagtttcttgagtttcaagtttcgaatgataataaagctgcgatgcttttagagaaacattttcagatctttgactacgaagtacatggtgacggaattatccgcattttctcgcatattggacaacagggagcaattaataaattacttgttcagaacgatattgaggtgtttaaaattttgatgagtgaagaccgcctggaggattatttcacaaaattggttgggggtggaaccattggttaatctgttatatgcagagttactaaaactcagaaggtctgcgatgcttctaataagtacgataggagcttcggtcgtcccatttatggttgtcgttgcatcctatgtacagataaagactgagaatcccgctcctgtcataaaatttcatgaacttttcagcaacgctaacttatatacagtcttggtagtgggggtcccgctgtatggagttgttgccgcttatatttttaacagggaatacatggatgatacactgaaaaaccttttaaccatacccgtttccagaatcaatctgatacttagtaaactattgctgctatttatctggatattctttttaactttagttgcgtgggggcttactttattactgggtgtgatcttgcaattcccggatctcagccaatcactcatactcaaatcatttttgcacttttcaattgggggaattttactatttgttttatcaacacctattgttctgatcacagttgttctaaagaattacgtacctaccattatttttacaatcctaattactttgataaatattatgacagctaactcagaacacagaggattgttcccgtgggcagcagccggagacatttcaatgaatacgcttctccctacttatcctccggagtactcctatgcaggaattgccctaatctcaatattgggatttgcttccttggtgatctattttaacaaagcggatatacattaatgtttatgaaagactttcaagtgaaaagccgattgatttgtgccgcataaattccgtgaaaatataaatgagtgtttaaataggaggatggtataagtgtctttttcagagatgaatatgaccgcttttcgtgctgtaaacgatctgggaaaagaatatccatttctaaactcagcaatggtcatacttgctgaatatgcagtgtttattttagcactcgttatgcttgttttctggtttacccgaaatgatagaaacagaatgatggtcatacaggcgggagcggcattcattatagcagagatgatcgggaaaattgccggtcaactctattccaatcatcaaccatttgcagttctttcaaatgttaacaaactggcagatcatgcggtggataattcatttccaagcgatcacaccatcctattcttttctatctcattttctttttggcttgtatataaaaaaacaggctggatctggatcatatttgcgcttagtgtagctgtttcacgcatatgggtaggtgtacactatcctttcgatgttgctgcaggagctctttttggaattatatcagctgtgttatcgtattggattgtaccaaggcttgcattgactaaaaaagttcttactctttatgaaaagggggagggctgtattttaccccgaaaagagaggtcgaaaaatgtttaggcggatgagaaacacctgtatgaaccaggtgtttttgttcgttcgagcacaaacaaaaaactcatattgatgattgatcaacaggtaataatttagcggataggggacaaattcccgacataaaaacataatcgaaatactgatcttgttggaattagggcttactctttaaatatcatgacgtttgtgtcaaagttatatttggaagctgagcgttacaattttcataagccgacaatttgaatacacctgtgtttatataaaatactgaaaattggctaaaagatcacatgatagattgcatatcatgtaataatgaatacccactgttacttacataaatacaaaaaatatgaaggcgggtgtcatgaagtgaaagaaattcgtgtccttatcgctgatgatgaaaaagtgatcagagatttattaaaaaaatacattgaacgggaactttatttagcagatgttgcaaaggatggacaggaagctttggcattatttgaacaaaatacttatcacctcgtaatattggatctcatgatgccaaaaatggatgggattgaagtatgcagaaaactaagagaaaaaaccaatgtgccaatacttatgcttactgcaaaggaccatgaagctgacaaaattgtagggttgagtataggagcagatgattatattacaaaaccttttagcgtaaacgaggttgtggccagaattaaggcactgatgagaaggtttttcattttagggagcggcagcggaacagaagagaagccgctgctgaaatataaaggtttatcaattgatgtgaaaagatatatcgtatgcgttgcaggtgaagaaatatcattaaccgcaaaagagctggagctgctgaaatttatggcttccaatccggaacaggtatttacgaaggctcagttgtttcggaatgtttggggcaatcattacttagaagatgacaataccgtgatggttcacataagaaagctgagaaaaaaaatagaaaaagacccatctaatcctcaatttatacaaacagtttggggaataggatacaaatttgcaggtgagaaagatgagtcgtaaaatcatatatcttatgtttctgcagattacactgatttgcctcaattgtttatatgactggcagcaccaagagcttaacactgttaaattggttgtctatggtctgctgatcggtttgtctgtaatccttattacaatttactgcaaattcaacaatgagctcattcaaatgatccatgcggttaagcggacattaaatgggaacttaacgacaagaatatttgcgaatggggctccgatatttaatgaaatggttttttcaataaacgaattgatcgagaagttagagaaaatacaggtggaaacgattcaaacgcacgcagcgagaaaaagcctgttatcaagcatatcacacgatattcgcacaccgcttacatcaattataggatatttagatgcgttgaaagacgatattgcagcctcggaagaagaaaagaaagaatacgtaaacattgtttcaaagaagtcgaatcatttaaagcagttaattgatgaaatatttaacatggctaaactggatgcagatgaaatgccgatgcagccagatattattgacttttctgaaataaccagagagttattgattgaatacttgccggagataaaaagaaatgaattagagcttaaaataaatattcctgaaagaaagtgtcttattatggcggatcgtctaagtatcgttagaattattgagaatatcttgaagaatgccatcctttacggaaaagaaggaaaggttcttggcatagaacttaaagagaatgacaaagaatttgaactgctgatctgggatagggggccggggataccaaagacagaatcagagaaggtatttgagaggatgtacaggggagacttatccagaagctcaggacactcgggaagcggtttaggactctcaattgccaaagcattaattgagaaaaatcaagggagaatatgggttgacagcaccccttatataaaaacaacattcggcattgcatttggaaaaataaaattaatacggacatgaatggaatgattagaaagagaaacagacgcttataatagccaagaaaccaatgtgttagagaacacattggtttcattttttcctaaacgggagaggttttcactgcttatttgatacatttaatcagtgcagcccaatccagatccccgaagccttgtgcgatcccgctttcaaaatggctcttggccagctcggcaagagggagttttgcggaaacctgttctgcggcggcgagcgccaaattggtatccttcagccctaaagacattttgaaaccggccggctcaaatttctcctcagccatgatcgtgccgtaattttgatagacgggagagccaaagagcgcgccggcaatttctaaaaattgtttccgttctaaaccgaacttctccatcattaagaatgattcagataacgcctccagcatagaaacgagcaagaaattgacgctgattttcgcggcattggcggtctttgtttcttcaccagtgtcaaatacttgctgactcaggatgttaagcagcggttcggcctttttcttcgcttccgccggtccggctgtgatgatgcgaagctcagccttctcggcggcatcggggcggccgaggacgggagcggcgataaaggactgccctctgcccgaatgtgcggcggaaagctgttctgacagcgccgtactgatcgtgctcattgaaatatgaatgccgttttcagataacccggcaataatgccgcaagctccgaaagtcacgtctgttacggcttcatcgtctgacagcatggacagcacgatatctgcatgttcagctgcctggcggggcgtttcggcatattcggcccctttttccagcaggtcagccgctttttctttcgtccggttatatacagtcaggctgtatccggcttttatgatattttcggcgatggggcggcccatattgccgagtccgacgatggcgatcttcatttcacagtccctccaatgaaaagttttccaccattatacatgcaaaatggttattctgctgtgtacaggattgccactttcagttcaggttctgaagaccatccggagtctgaggcggctttccccttataaaatccgctaaaccgcgttttaatgattgtttttgaacggggttttacagtgaacgtttttgagttgaatgtgacgtcctttatgttttctgataaatccggggtgacagaaatggtttgttccccttttccgtaatgattgatataaagcgtgcagctcatgcccgctctttttcgctcaaccagatgactgcattcgctgcggtgcttcaaatattcgacagcctctttttcgggcgcgaactgttttaaggaaaaagcggcatattcggtggcaggactgataccggaagcggcccccatactgagaaagatcagaaacagccccgccgcgggaagcgtccgcctgaacgcggcggcacaccagattaacgccgcaaagtaaagcacgaccccgggaatgacggagatatgggctccatcttccgaccaagaggaaaagccgagtaactcaaagatgtaatcagacaccgtgcggccgttatacagcggggcaatggacatgacactgaaagccaggaggacagaagaaatgattttgtgagaaaagatggtaacggcgcacacctctttacgtttttttccagactatcatgttttctcaaaaaaaagaacagccggcagccgttcttacttgaaaatattaaaccagcctttgcgagcgaaccaaaacagcatggcggccacaaggacggccattacgcccaaaacgataaaatacccgtatttccaatgaagttcaggcatgttatcgaaattcatgccgtaaacccccgcgatgaacgtcagcgggataaaaatggtcgagacgatggttaatgtcatcataatggcgttcatccggtttgaattcagcgtcacatagctgtcccgcaaatctgaagtcatatcacggtttgactcgatcagctcagccagttttaacaggtggtcataaatatcgctgaaatacgctttcgtttcacggctttctcttacatggtcaaggctcaaaatccggtacattaaatcgcgcatcggaatgatcgtccgcctcaggttcaaaagatcagtccgcaattcaaacacttcattcattaaagtgccgtaagatttatgggttctgctgtcttcaatttcattcaaccggtcttcaattttgtacagcacggggaaatattcatcgacaagctgatccataatcatataagtgatgtgcccgggcccttttttggctaatcccggagaagcgaaaaaacgttctctcacctttgagacgccgggcgattcgtgcaaatggaagctgacgatgaaacggtcagactgaaaaatgtccacctcttccatttccagtgtgtccgggttcaaggcgtggagcacataaaaacggtagccgtcatagtggtcgattttcggccgctgcatgtgctgaaagcaatcctcgatcgcaagcggatgaaaatgaaaataatcccgcagcagctcggtttcatgcatctcagcgccgaaaaaatcaatccagtaccatgcgatgtccggttgttctgtacgtgatagggggatattatctaatatctcattatgtgttgtgattgcggttatatgtatcataaacaaccctccgcctgccattatatcatgcggcgttatgaagaaaagtatacgaattgccgctcggccgcttcatgatatacttggacaaaaaggggtggagcatatgtggaaggaaatggtttcggtcacaccgccgtatcattttgataaagtccttgaaaggctgtcgctcgatccgctgaatgcggtcgatcttaaagcaaggtcaatcaaagtgccgctcagaacacgggacggtaaactgtccgtcatcacggttcaaggggaaggcaccgccgcagacccggtttttctcgtcagcggagaaacggaccgcaaagagatgattgaacggatcaaacacatttttcagtgggagcagccgcttcagcctgtacttgatcatttctcaaaaacaaatctgtcggcgctttttgaggagcatgcgggaaccccgctcgtcttggaatatgacgtctacaactgtctcatgaaatgcatcatccaccaacagctcaacctttccttcgcttttactttaacggaacggttcgtccatgccttcggtgaacaaatagacggcgtctggtgctatcccgagccgaaaacgatcgcggcgcttgattatcaggacttgcgggagctccagttcagcatgagaaaagcggaatatgcgattgacatttcacggatgattgcagacggagcgctcaatctggcggaactttctcatttatcggatgaagacattatgaaaaagctgatcgccatcagaggcatcggcccgtggaccgttcaaaacgtgctcatgttcggcctcggccgcccgaatctgtttcctttggcggacatcggcctgcaaaacgccgtcaaacgccgcttcgctctagaggataaaccgtcaaaagacatgatgctccaggtaagcagggaatgggcgccgtatttaagctatgcgtccttgtacttgtggagaagcattgaatgaaaaaaggaaacttccagtgaaaaacatgaaggaaccgccggctgcatgttatactgaaaagatgtgatatttcaaatcagccgttttcccatgagaaaggctttatatagaaacggagagaaaaaaacgtgaatcaacatcaaaaaaaggcgcctgccgaattgaaaatcggacagacatttccgctgaccatcaaacgtctcggcattaacggagagggcgtcggctattttaagaaaaaagttgtcttcgtacccggcgctctgccaggggaagaagtcgttgccgaagcgacaaatgtgcagccgaaattttcagaagcacgcgtcaaaaaaatccgcaagccgtctgaacaccgcgtcacgccgccatgcccggtctacgaccagtgcggcggctgtcagcttcagcatctggcatacacccagcagcttcgcgaaaaacgcgacatcgtcattcagtctctggaacgtcatacgagattcaatgtcgaagaaatgaacattaaagatacgatcggaatggacaacccttggaattaccggaacaaaagccagttccaagtcggacgctcgcaaagcggcagcatcattgccggcttatacggacttgattcccataaaatcgtcccgattaaggaatgcattgtccagcatccggcgacaaacaaaacaacgggtatcgtccgccgtattttggaaaaacacaacgtatccgtttataacgaacgaaccaaaaaaggcgatgtccgcaccatcgtgacgagagtcggttttgaaacaggcgaagtgcaggtcgtgcttgtcaccgcgaaagagacactgccgaataaagacgagatcgtcaaagccattcagaaccgtctgccggaagtgaaatcgattattcaaaacgtcaatggcgcgcgcacatccgtcattttcggtgacaaaacaaaagcgctggccggaagccatgccattcaagaagtgctcggtgacgtgtcatttgaactgagcgcccgcgccttcttccagctcaaccctgagcagacggtcaagctgtatgacgaagtgaaacaagcggctcagctgacaggaaaagaaaaagtcgtagacgcgtattgcggcgtcggtacgatcggcatgtgggtttcaagcggcgcaaaagagatccgcggcatggacgtcattaaagaatcaattgatgatgcgaagaaaaacgccaaaaaacacggcatcaaaaacgcggcatatgtcacaggaacagccgaacactggctcccgaaatggacgaaagaaggcttccgccctgacgtggtcatcgtcgacccgccgagaaccggctgcgacagaacatttttagataccatcaaaaaagtaaaaccgaagcgcttcgtatacgtatcctgcaatccttccacactggcgaaagacttgcagacgctatcgaaggactatcgcgtcgaatatattcagcctgtggatatgtttccgcagacggctcatgtggaagccgtggcgaagcttgttttgaaatcgtctaactaaaataaacaattcagacctggatttcggtaaataaacaattccgatttccgggtctttttcatgttttgcccttgtcctatctgtctttatttaactgataaaaagagttgaaaaaacgtatggaaaagcaagtgaaaaacagccaagcaggctgctttctattaacactttcttttttccgtttggaaacggcattacagacaaaatatgaagatcttgttgtgaaccagaagcaataacaagtcgttcaagttccgtgaatacttgtaatctcagttaatattttgtgaacttctttcttaaagaataaagtccccgacactcatcggcacatctactattggcgatagttgtaataaatgataaaaaggaggtgaaaccgaatgagagatattggaacctcaacaactgaacgaaggttctgaagtagaaactgtaaaagacaaggttgcttacttacactaatcacaacggcagttggcacatcactatcagcaacaactgtggataaaagatcaaacaaactaaaaaagcatgtttcgtcgttatacatgatatgaaagcctaaacaggaaaaaaggcccccgattactttccttattactaaaaaagaaataaatccgaggcggaaacgcaagtgataacaactattacagtaatacctgcgatggttatatccttaataagtaattatcgcgacaatcattcttcatcatataatgatgttagattgacactaggctaaaaagtattggagaaaaggaaatggataaagtaaacaaaaaacgactgttatttaaaagaagttggtttcaaacgttgttggcatttttagtttcacagctttattttaattttgcagtattaacgggatggggtcctaattatagagaaatgaatggattcccagcaaacatagttgaactggatttctttcaaacatatctttcattctatgataatccatggtttaatattgtcactgttttcttgggggttttcactgttatacaaataattacaggtgtaacaaaggatattcgaaataaaagcaataacttctgatgccttatttaatgatgaaagaaaatgaatactttcttattcttatgagtgaggactgcggcacttagtcagcagtctattttattggttttggatcaggattaccgaatcgtaaccttatacattgtataaagatattaacatatggggtttgaaagccaatcgccctttagtacatatactgtatagagccagaagccacttgctgcgttggttatttctaaaccatgagcaaatctcaaatggtccagattgaagttttgaattcttttaagtaagagtttattttctcttctcatcctccttactccataccatccccaactcaatttgcataattaaatctcttgaaattagttttccgcaaaatgatattgagataaggatatggtgcagcgttaaatattttatcttcgataacaggacaattattttgcattggtaatagggagaactcttatgatattctatttaggttggaatcctttttgtccaaaaagagcaaaagtaaggccgctaagtaagatgaaggtcagcgctactattaataaaccacaatataaataaaaaaataggtgtagataatcttcacacttttttctctctcaaacccttttaaaggttaaggagttgactgagttgatcagaaatgaacgatatggggttaactttagcgatagtctattacgttaactcaattaaggtgttctgcttcagtttgcttttcactttttaacgtgtaaaaagtgaaatgttcaaaatttactatcgtttgataagaagtgctgacacatgctataagtgtaaaagaagcatggtcagtttttaattttgggataaaggtttggctgtatcccatcatgaaaggatttggatttgttatgacagataatttctggcgtgaattaccgcggccattttttgtactggcaccaatggaagatgtgacggatgtcgtttttcgccatgttgtgagtgaagcaggcagacctgatgtgtttttcacagagtttacaaactcagaaagctattgtcacccggatgggaaggatagtgtgcgcggccgtttgactttcacggaggatgaacagccgatggttgcccacatatggggagataagcctgaaaactttcgccaaatgagtattgggatggcggaattagggtttaagggcctggatatcaatatgggctgtcctgtacctaatgtggcggggaatggaaagggaagcggcctgatttgccgtcctgaagttgcagccgaattaatacaggcggcgaaagcaggaggtctgccggtaagtgtgaagaccagactcggctacacggatatagacgaatggcgcggctggctgacacacatactgaaacaagacattgcgaatctttccattcatctgcgtacaagagcggaaatgagtaaagtagatgcgcattgggagctcatcccggacattaagaaacttcgtgacgagatagcgccagagacccttttgacgatcaatggagatattcctgaccgggagaccggcttgaaactcgctgaacaatacggtgttgacgggattatgattggacgaggcatttttactaatccattcgcctttgaaaaggagccgagagagcatagcagtaaggaattgcttgatcttttgagattgcatctggatcttcatgatgaatattcaaaagcagaagctcgagcatataaaccgctccctcgctttttcaagatatatctccgcggattccggggagcaagtgaattaagaaatcaatgcatgaatacaaagtcaacagatgaagtgcgtgcattgctcgatgactttgagagaaagtatcttgatgggatggagcaagagtgacataaacaactcttcatccggcccggagttcggtttgaattccgggtctttttgtgtgcggcttttacccagacatatccgtcatgcagaaataaacgaataatggtacattgataggagatacatcataaagggggagagaaaaatgaaacgactgtgcatcatcccctgcggcaagaaaaaaatttgggatgtccattcagatacaggtccggtaagggcggaagacgcttatctcagcccgtttcatcaggcgtgcgagcaatatgcgaaagcatttttcgatgagtgggtgattttgtcggcgaagcacggattccttcgtccggatgatattgttcccggaaattacgatgtcacttttggaaccggtcatccggagatcatggcagcggacgagctgcgccgtcaatttcatgaaaaaggcttttccgacatcgaagagcttgtcatgcttggcgggaaaaaataccgaagcgtcctaaaggccgtcatcggagagcatcagcatatcacctggcctttgtcatcgtataaaggcattggctacatgcttcaagcgctgaatcgggctgttgaagaaaagcatgaactgcaagcacgcggatatgaaaaaaagagtgtaaccactcaaacgccgcgatagactgtatgcagaagaatgaagcagttaaaagatttccgaggaaataaatacgtcgatcattgtcaaagacagggtgatgcccggtcttttttgtatgccataaaacgagacaaagggaacagatcgagacaaaatgagacacctgtctcaaactgtctccagtgtaaaaataaaaacattcattttccgggctccaaaggctggcacacttcttgcatttgtatatgtgaaccctaaatagaaggaggcgcacaaaatggaattgttaaaacgagaagacttgtcattaactgaggagaaagcgctgtggatgtaccaaaagatgctggaaatcaggggctttgaagacaaagtgcatgaactgttcgcgcaaggagtgcttcccggattcgtccatttgtatgccggtgaagaagcggtagctgcaggcgtgtgcgctcatttagatgatggcgacagcattacaagcacgcacaggggacatggtcattgtatcgctaaaggctgtgatctggacggcatgatggcggaaatattcggaaaagcgaccggactgtgtaaaggaaaaggcggttctatgcacattgcggatcttgataaaggcatgttaggcgcaaatggaatcgtcgggggcggctttacgctcgcatgcggatcagcgctcacggctaaatataaacaaactaaaaatgtaagcgtttgcttctttggagacggagccaataaccaagggaccttccatgaagggctgaacttagcggcagtatggaaccttcctgtcgtgttcatcgccgaaaacaacggctacggcgaagccacgacatttgagtacgcgtcagcctgtgattcaatcgccgatcgggcggctgcctataacatgccgggggtcacggtggacggaaaagatattttagcggtttatcaggcagccggggaagcgatagaaagagcaagaaacggcggaggcccgtctttgattgaatgtatgacttacagaaactacggccatttcgaaggggatgcccaaacttataaaacaaaggatgaaaagactgagcatcttgaagaaaaggatgccattcaaggctttaaaaactatcttctaaaagaaacagatgcaaataaactgtcagacatcgaacagcgtgtcagcgaatcgattgaaaaagccgtctcgttcagcgaaaagagtccatatccgaaagagtcggagctgttgacagacgtctacgtgtcatatgaaaaagggggaatgtgagatggcgagagtcataagcatgtcggacgcgatcaatgaagcaatgaagcttgcgatgagaaaagacgaaaatgtgcttgtaatcggtgaagatgtcgccgggggagcggcggtcgatcatttgcaggatgatgaagcatggggcggtgtactcggggtcacaaaggggctcgtacaggaattcgggcgcagccgagtgctggacacaccgatttctgaggcgggctacatgggtgcggccatggctgcggcatccacggggctgagaccgattgcggaactgatgtttaacgattttatcggaacgtgctttgaccaagtgatcaaccaaggggcgaaattccgctatatgttcggcggtaaagcgcaagtgccgatcaccgtccgcaccacatacggagccgggttccgggcagccgctcagcattcgcaggcgctgtatggcctgttcaccagcatcccgggtctgaagacggttgtgccgtccaatccatatgacgccaaaggtttgctgctttcggcaatagaagacaatgatccggtattcttttttgaagacaaaacgtcctacaacatgaagggtgaggtgccggaagattattatacaattccgctcggaaaagcggatatcaaacgcgaaggcagcgacatcacgctgtttgcggtcggcaagcaggttaataccgcgcttgaagcggctgcacagctttctgagaaaggcatcgacgccgaggtgcttgatccccggagtctgtctcctttagatgaggaagcgattttcacatcgttagaaaaaacaaaccggctgatcatcattgacgaagccaatccgcgctgcagcatcgccacggatattgctgcgattgtcgccgataagggctttgatttgcttgatgcgccgattaagcggattacagcgccgcatacaccggtaccgttttcgccggtgcttgaagatcaatatttgccgacaccagaccaaattgtcagcgtcacgcttgaattgcttggcgagccggcaatgaattaaaggagggatatagaatggctgtaaaagtagtaatgccgaagctgggaatggcgatgaagcaaggtgaagtatccgtctggaataaaaaagtcggcgacccggttgaaaagggagaaagcatcgccagcatcaactcggaaaaaatagaaatggaaatagaagcgcctgaaagcggcacacttcttcacattaaagtcaaagagggagaaggagtcccgccgggaacgcccatctgttatatcggggaaaacggcgaagaagtgcgggagaaggaggcgccggctcctgaaaatgcagggaaaccgcaatctgaacctgaacatattcccgctcccaaagccgtgcaaaagcgtaaacaccgcgtgaaaatatctcccgttgcccgaaaaatggcggagaaagccgggttgaaagttgatatgctgaacgggacggggcccggaggcagaatcgtaaaagctgacgtcatcaaggccatgaagacggaatctgaaccgcagtcttcggttcagacgacacagccggagggaaaaccggcttcagcgatgagaaaagtgattgcagaccgaatgcacaaaagcctgcaaaacagcgcccagctgacgctgacgatgaaagcggacattacggagcttgtaaaatggcagcagcagctcgccgacagcgcgaaaaagcggagcggtgttaaactgacggtcacacatttcgtatcccgggccgcggtgcttgcgctgaaacagcatcctgagctgaacagctcttatcaagaggagcggatcatcacctatccatatgtccacctcgggatggcggtttctcttgaaaacggtctcgtcgtgccggtgatccgggatgcggaaaagctttcattccttgagcttgcggagcacatcagcacatcggcacgccgggcgcgggaaggcaatgcttccggagatgatctgcacggatcgacattttctattacaaatctcgggggttacggaatcgagcatttcaccccgattcttaatccgcctgaagccggtattctcggagtaggcgcaagctatgaaacgcctgcgtttaaaggagatgagcttgtcaaaagcaccatgctgccgctgagccttacctttgatcacagagtatgtgacggcgcaccggctgcggacttcctgaaaacggtcaaagcgctgcttgaagagccggccggattgattttatagagagggtgaagagattgacactagccattatcggcggcgggcctgccggatatgcagctgccgtgactgccgcgcggaggggagaagaagtcgttctgatcgacaaagggccgctcggaggcacttgtctcaatgagggatgcatcccgacaaagtcgcttttggaaagcgcgaatgtgctcgataaaatcaggcatgcagatacattcggcatcgaactgccgcaaaacattacactcaattgggcccgcatgcaggggcgcaaacggcaaatcgtcagccagctcgtgcagggaattcaatacttaatgaaagcaaatcagattaaagtcatcagcgggacagcttcatttctcacagagcagacattgcttgttgaaggagaaggaggcgcaaaagacattctggaagcggatcggatattgattgcatccggatctgaaccggcggagctgccgtttgccccatttgacggcgattgggtgatcgacagcaaagacgcgctttctttacagaaaatcccttcttccctgcttattgtcgggggaggtgtgatcggctgtgaatttgcctctttattcagccggtttaaaacgaaagtgacggtgattgaatcggctgaccggctgctcccggcagaagacggggaaatcgccgccgtttttgaagactctttaagagacagcggggctgatattcagacaaaagccgtccttcagcggattgacaaagaaaggaaaaccgccgtgtggacaaaagacggcaaagaaattgaggcgcaggctgatcacgttttggttgcaatcgggagaaagccgcgtttgcatggcttgaatctggagcaggccggcatccggtattctccgcgcggcattgaagtcaatgaccatatgcagaccaatgtgcctcatatatacgcatgcggcgatgcggccggaggaatgcagctcgcgcatgccgccattcatgaaggaatcacagccgcctcgcatgcctcgggaaaggacagcaaagtcaatatgcgggcggtgccccgctgtatttatacatcgccggaaatggccgctgtcgggctgacggaaacacaggcgagagagacatacggagatgtgaaaatcggagaatgctcattttctgctaacggaaaagcgttaattaaacatcagcatggcggcaaaatgaaaatcattgccgaaccggaattcggagaaatcgtcggcgtgtcaatgatcgggccggacgtgacggaattgatcggtcaggcggtcatgatgatgaacggtgaaatgacggcggatatgtcggagcactttatcgcggcgcatccgactctgtcagaaacgcttcaggaagccctgctgaatgtcaccggacttgcggtgcattccgtataaccggaataccctttctcagatgagaaggggtgtttttcgttgaaagcgctttatttttcccctacaatatatgaaaagatggtctgaacaggggggagcgaatacaatgaatgtcattcggaatgattttaaaacctggaagcgctttgtgaaagaaggtgtgcttgatgaatcccgtattcagaagcgggtggccgcctcatggcaccgctgcaaaaaagccgacgtcaacccttatctcgaaaaggggccgaatgtgatgccggcagatcatttagaaaggcaggccgagaagcattcattatttttagcagcctcaatgcctcatgcagaaagaatgaaaacggcaatgcgggaaatggaaatgatggttctcctgattgattcagacggcgttgtccattcagttgacggccacccgcgcaccattcatgaagcgaaccgcatcaatttcttaaaaggcgcccgctggacggaaacggccgtcggcacgaatgcaatcgggacggctctttatacaaatgagccggtcatgatacacggctctgaacattattcgctcgcttctcatcaatggagctgttccgccgcgccgatccgttatgaagacgggcggctggcgggtgtcattgatatttcctgccccgccgcccgcgctcagccttttatgctcggaattgcctcctccatcgcttatacggcggaacgggagcttgccctaaagatcaaaatgacagaacttgacatgatcagcaaattcaccgggctgacccggtcacacgatccgatcgtgctttgcaatgaaatgagccgggttatcgccgcaagccgtcccgttcagcattttaccggacatatgctgcgcgagcttgaggaacagggctatcacatcaagcaggcgaagcgggaggagaacggttacacatgcgtttatttatccaaacgagaagaaaagccgtcttttatattccatggtgcggcaggcaaaagcccgtcatcccgacatatgcttcagcagctggagcttgtcgcccgaacggacgcaaccgtttgtcttacgggagaaaccgggacgggaaaggaggttgccgcccgggcgattcataacaacagctccaggaaaaacggcccgtttatcgccgtcaattgcggagcggtccccgaaaagctgattgaaagcgaactgttcggctactcggaaggcgccttcaccggggccaaacggaaaggacataacggcgctttgcaaaaagccgataaaggcacgcttttcctcgatgaaatcggagaaatatcacactccatgcaggtcgctctgttacgggtgctgcaggaacggaaagtcaccccggtcggcgggacaaaagagattcccgttgacatcagaatcatcactgccacccacactgatctgagacagcttgtcgaatgcaaaaagctgagagaagatttattttaccggcttcacgtctgtccgatccatctccctccattaagagaacgcaccgaagacattcccggcctcttccttgaatttcagcgaaatcgcggctggcggggggagcttcctgatgactttttagacctattaaagagccggaaatggccggggaatatcagggaattgtttaatgtatttgaacgtctttccgtcatgttcccggacggacggctgtcagggcgccccatcgcagccctgcttgaagcgtcaggtcttaaagaggcggccgagtcttatgaacaggaagaagcgtcccccgtctccatccgggagcacattcagaaaaacatcatcgtaaacgcgcttgaatcggcgaaggggaatgtcacgctggccgccaaaatggctggaatcccgcggagcacgttttacaaacgtctcaaaaaattcaaactcaccgccggacaattgtaagaaacaagcatacttctcttggctgccggacacgttatgtgtgaggcctaaaggaggtttgagacgtgaatacacagcgtgcgaaagacatttcggaatccgccgccatggcgtatgtgacgtatgaaggagttccgatttatattcagcatgtcaacgaagacaaggaaacagccagaatttttccgatcggaaatcctcaatttgagcaggaagtgctgctttctgatttacaagagcatttttgagaatgggtctgctgatgacagcaggcctctttcgtacctgtgggaactttcccgctttttgagaaaaataactaaaaatgattaaatgatctaactcctccaaacccggtacagatcggaccttctcatgatataaataaaatgtaaacgttatcagaggagggcttcacatgacagacaaatcattctcaatcgttattgcaggcggcggcagcacatttacccccggaattgtattaatgcttttgaatcacctggaagagtttccgatcagaaagctgaaactttatgacaatgataaagaaaggcaggagcggattgcgggtgcgtgtgaggtattcataaaagaaaaagcgccggacattgaatttttggcgactgatgacccagagacggcttttacggatgttgacttcgtcatggcgcatatccgcgtcggaaaatatgcgatgcgcgcgcttgatgaacaaatcccgctgaagtacggcgtggtcggccaggaaacatgcgggccgggcggaatcgcatatggcatgcgctctatcggcggtgttctggagattcttgattatatggaaacgtactcgcctgacgcatggatgctgaattactccaatccggcggcgattgtggccgaagctacacggcgcctcagaccgaattcaaaaatattgaacatctgcgacatgccggtcggaattgaggatcgcatggcgaacatcctcggattatcttcacgaaaagaaatgaacgtccgttactacggcttaaaccactttggctggtggacgtccatcacagaccggcatggcaatgatttaatgccgaagctgaaagagcatgtccgtgaatacggctacgttccgaagacggaggccgaacagactgaagcaagctggaatgacacattcaaaaaagcgcgcgacgtacaggcggctgatccggatacgctcccgaacacatatctgcaatattacttattcccggatgatatggtgaaaaaatcaaacccgaaccatacgagagccaatgaagttatggaagggcgcgaagctttcattttcagccaatgcgatatgattacgcgcgaacaatcatcggagaacagtgaaattaaaattgatgatcatgcttcatatatcgtcgaccttgcccgggccatcgcttacaacaccggggagagaatgctgttaatcgttgaaaataacggcgcgatcgcaaactttgatccatcagccatggttgagattccttgtctcgtaggctcaaacggaccggaacccctctcagtcgggaaaataccgcaatttcaaaaaggcctgatggaacagcaggtgtctgtcgaaaaactgacggctgaagcgtgggaagagcggtcatttcaaaagctgtggcaggcgctgatcctatcaaaaacagtgccgaatgcccgtgtggcaagactgattcttgaagatctgatggaggctaataaggactactggcctgagcttgatgtgagtccgtctcctatttcctgatgaaaatcttccccgttttctttatctgttattctatataatagaaagaaaacggggggatttttgggatgagtcttgaagaactggttaaccagcattacgcgaaattaaatgacaacgatttttatattttaaaatatatattgaatcataaacatacgtgctaccatctcgggatcaatgacatggcgaaagcctgcaatgtctctcggtcttccatcctgcggctcgcccaaaaactgggcttcagcggctacagtgaattccgggtttttctgaaatgggaggatcagcctgaagagggcgagaatatgacgtttgaaaagctgctggatgatattgaagccaatgtaaaatacgtgaagtcaaaagatatgacggagatgtgccggctgatagatgaagcaaaacggattttcgtttacggatcggggacggctcagagggtgtgcgcccgtgagctgcagcggatgtttgtatcccggcggaagtatctgattttaattcaggacatcacagagtttgatatcatgtgtgatgattttaaggttgatgacgtattcatcattatttctttatcaggcgaaacacccgaattaattccgcaggtaaggaccctgtccgcaaagggagttccgtttatttcaatcaccaatctgaaaaacaacgtactggcgcaaacgacgccgtataatctttatgcgaccagcaagccggtgacgttaagcgataaaacggaaatcgtcgcatttgccccgttttttctggtgggcgaagcgttattccgtgcatatgttgattataaagagctcgaacattttgataaatagcgggaggtcacgtgaaatgatgcaaaaagtccagcgcttcggcagcgcgatgtttgtgcctgttttattatttgcattttccggtataattgtcggtctgagtacgctgtttaaaaataaaacgctgatggggccgctggctgatcctgacgggctttggtatcaatgctggtacgtcattgaacagggcggctggaccgtctttaatcaaatgccgctcctgtttgcgatcggcatacctgtcgccttagcaaaaaaagcgcaggcacgagcctgtttggaagcgcttacagtttatctgacattcaattactttatcaatgcgattctgacggtttggggcggggcttttcacgtcgatatgactcaggaagccggcggaacgagcgggctgacgatgattgccggcatcaaaacgcttgatacgaatattatcggcgccatctttatttcatctattgtcgtgtatttgcacaatcgttattttgataaaaaactgccggatttcctggggatttttcaaggatcttcatacatcgttatcatttctttcttcattatgataccgatttcacttgcggtggcatacgtatggccgatggttcagtccggaatcggctcgctgcaaagttttctcgtttcttccggggcgatcggcgtgtggatttacacattcctggagcggattttaattccgaccggcctgcatcattttatttactcgccgtttatttacggtccggctgtggctgaaggcggtatcgtcacctattgggcccagcatctcggggaatactctcaaagcgtcaaaccgctgaaagaattgttcccgcaggggggcttcgcgcttcacggcaactcgaaaatcttcggcattccgggaatcgcgctcgctttttacgccacggcttcaaaggaaaagaaaaaaatcgtcgccggcctattgatcccggtcaccttgacgtccattgtcgcaggaattacagagccgattgaatttacattcctttttatctcgccgtttttatttgcggttcatgctttgcttgccgcttccatggcaaccgtcatgtatatggccggcgtcgtcggaaatatgggaggcggtttgatcgaagctgcgaccttgaactggatcccgctggcgtcaagccacggcttgacgtatgtataccagatcatcatcgggttgtgttttaccgctgtttactttttcgtcttccgtttcctcattctcaaattcaacatcgccacaccgggcagagaaaaagaggaagggcaggaaacaaagctctattcgaaaaaggagtacagagaacggaagcaggcttcaaaagaaacagcggcggcagacgaaacacggcgggatacagccgctttgtatattgaagcgctgggcggaaaggacaatattacggaggtcaccaactgcgccacccgtctccgcgtcactgtcgctgatgaatcaaaggtcaaaagtgacgccgatttcagagagctgggagcccacggggttgtcagaaaaggcagggcgcttcaggtcattgtcggattaggcgttccgcaaatgcgggagcgtgtcgagaaaatattgaacggttaaaatactgcagcagcagactatgtacagagcgcttgttaatccggcgctctttttatgttttgaagaaatgtatgaatttgtcatacctttgccacctgtacatgcaggagtgaaaacgaaagacttctgtggtgttcggtgttttaaacagcaattcaaaaataggaggcaaggcaatgacaaactatacgactttcttaggactttacaaacccgataaaacggaggggattgaggttgaaagcattgctcaaaactttgaagcgattgacagcaaaatcggtgctgcgcttagcaacggcacgtcaacttatgaaaatttaaatgaaagacttaacatgtatgaaaacagatttgaacatgtgacagagcggaacgttatggattttggagctaaaggtgacggcgtaacggatgatacgcaggcatttcatgatgccatggccgacggaggttatgtcgtaacagttcccgcgggtgtattcagaacatcgggattgtttgttccgtcaaatacaatgcttgtcggagcaggcaagaaaagaacggtcattaaattattagacgaaacaccggtcggccattctgttctgaccaacagtgattatacgaacggtaatgaaaatatttatgtcggccatctcactttggattggaacaaggatacgcgtcctgccggctggaagattccgaaaggtcccacttcaagctgtttgctttttgcgaatgttgactattcttttgttgagcatgtgtttgcgaagaacgccggcctgcacggctttgattctacaagcccgaactataaccgacatggagaaaaagatgatccaacttattatcagcccaacggctgtaactttgtaacgttttcacattgtgaagcaacagggtccggcgatgataactttacttgtcactttgggaaacacacgactttcagtcattgcctctcttatcatcctatggggctaaacgatggaacttctaacacaaactgttttgaaattgatgacggctctcaagacgtaatgattgatagttgtatctcaattggaggagtccgaggctttgagattaaggcacacggttatgcaccggctgcgagagagtgcagcttgttaactgtcgcgcatacgaaaatgccattggatatagcattcgccatatcggtcaccacacagcaagcgatcctcagtcagcgacagcccacgatgtgcagcttgcgaattgtatcgcatataaccctaagccgaatgatctttacaaaggggcgggtccaaacgcgttgcaaatctccggatatgatggggtgagtgttgtgaatttccatgctgtttgtgatgatagttcaattgattataagggtaattcggtagtcagcgtattttataaaggacgcttaattagcttaaagaatataaccattcgcggatttaagactgcagacaatgacttatatattgtcggcggggataactcagtagggaaagtaatggtggatggtgtcaccttgattgactccggaaaaaaaggagttgcatttggcagcggaatgtacgagtctgttgttagtaatgtttggggacagagatctccaaaaaataatagcgggacagttggaatttattcctcagatccagatcttaatgtatccaattgtgatttttcaggttatgaaactgactttaacattggaggagcagtcactccttatttcttattcaaacataaaggaagcggagtcattggctcccgtgaatctcacgctacaggcaataataattttgtggctggttctgttcggggaagagcaaccggagcggctcaatcttcagtgctttcttcgtacaatacaattaatccgaattcagattctgtagcacttggctggggtgccggcagcactccgtcatcagccaacagaaagattgagcttcacgcaaaagaaggaacaattaaggctgcgggaggcgtaacaggttcctcgacattctctgactacgccgagtattttgaaagcctgagaggggaaaagattccgacgggaacacttgtcacacttgaaggtgataagatcagaccggctgaaaaaggtgacctcatgcttggggtcatttccgagaccgccggagtgattcttggcgagtcgagttttcactggtcgggacgatacgtaaagaatgaatttggcggctatgtttatgaagaacagaaagatgcgaacggccatacggtcatggcgccaaaggaaaatccggactttcggcctgaagaagactacgcttcaagagaagagagagacgaatggaacattgtcgggctcatcggccaggtatatgtcagatgcgatgagactgtgaaaccgggagattttattcacgctcataacgggattgcaacaaaatctgatgcttcaaaccagcgctggcaggtcatgaaagtgatcaatgagtttgatgctggtaaaggattcggggtcgctctcgttttcattcgttaaatgaaatgacaaagcataattgaccatcctgaatagcggacgcctttttaaaggctccgctaattcattttaaaatcaaggctccgattcaaaagctggtaataagaaaagataagacagcctccatatatctgcacgcctcatcccttcatttttatcttcaatcattttacacaaagtacataataaaagtgcgagttcaagggttaatcctttattcatttaagacaaacaaataaaataaatatacatacatattgaacaaaggatttggaggcttacacatgtcaaaggctttatcatatgtaaaaccgtattctcttttggcgggaatcgctctgtttttcatgctcatcgagcttgcggtagagctgatacagcccctgctgatcgggaaaatcattgacgaaggaattttaaagcaggatctcggtacggtttggctgtggggcggcgtgatgatcggactgaccgctgtttcattcgcatcgggaattataaattcattctactccgcccacatcagccagagctatgcgtatgatacgcgaaaggggatttttcaaaaaattcaatccttctcttattcgacgtttgcgcaattctcatccacatcgtttatcacccggctgacaaacgatgtgacacaggtccaaaatatgcttttcatgagtctccggtttatgcttcgtgcgccgttaatgatcgcaggcggcattattctctcgctgaccgtcaatgcgaaactcggtttttttctgctgatcacggtcccgattttgcttttgtttttgctgtgggtgctgaaaagaggcggcgcgctgtttcggtctgtgcaaaagcggcttgatcaggtcaacacgatcatgcaggaaaacctgacggcgatcaaactgattaaagcgctcctccgtgcaaaccacgaagtgaaacgttttttgaaatcgaatacgaagctgatggaaaaaacggtctccgcttttcgtctcgtggaagcggcgatgccgattttaatgctgctgatgaacatttgcattttgtttatcttatggttcggcgccaaaagcattgctcagggcggagcgcaggtcggcgatgtcgtttccgtcattaactatgcgacgcggattacaggcgcgctgtccgtccttccttttctcatcatggtattttcccgggcgaaggcttccggggaaagaatcggcgaggtgctggaaacagaaggcggcgagggaacggggcaggacccggcacgggcgcttgcaggcgggattgagtttcgcgaagtgtccttccgctatccgggcatggaaaaagacgcgctgcatcacgtgtccttttctgccagcccaaaagagacggttgccattatgggcgcgacaggctcaggaaaatcaacgctttttcagctgattccgcgcctgtacacggctgattcgggcagtattttcatagacggcaaaccgatcggtgaattctccgcttgcgggctgcgcagggaaatcggctatgttccgcaggaagtgcttctgttttcgggaacaatccgtgaaaatatcgcctgggggcgggaggatgcttcactagatgaagtaatggaagcggccaaagacgcgcaaatccatgacacaattatgaagctgtcaaacggatacgacaccgtgctgggacagcggggcgtcaatttgtcaggcgggcagaaacagcggatttccatcgcacgcgcttttatcagaaagccgtccctcctgctgttagatgacagtacgagcgcgctcgatcttcagacggaagcgaagcttttacaagcgatcagatcctatgaatgcacgacactgattattacgcagaaaataacgactgcaatgaaggctgacaccatcttattgcttgaagacggcgaactgctggccaaaggcacgcacaaagagctgatggcacagtctcatctgtaccggcagatttatgaatcacaattcggaaaggagggagctgacaatgcaaaaagacattcgtaaacctttccgatatccgaaaataccgctcaaatcaaatgaaggcggcagaaaacgcgcgaaagcaaaagatacaaaaggcacgctgcgcagaatctggtcttatgtagccgagaaaaaagggcttttaacccttgtgatcatcatggtagtcataagcgccatattcggcctgctcggaccgttcgtcatcgggaaagcgattgatcattttatcgtcggacagacgacagacggattggcgggggtgctgttcatcctgtttgggatttacctcgtgcaatcattgtccttatggtttcaaaactattggatgatcaatatctcgcaaagcaccgtgtttaaaatgcggagcgagctgtttacccatctccatgagctgccgattccgttttttgataaacagcggctcggggacttaatgagccgggtcaccaatgatatcgaaaatgtcagctccactttaaatacatccgtcattcaagtgctgtcgagcgtcattacattcatcggcacaatctccgtcatgctgtacatgagtccgcttttaacattgatcacgcttttgattattccgatcatgcttttgagcattaaatggatcaccaaccggacgggactgctgtttaaacagcagcagaaaaacctcggcgagctgaacggttttattgaagagtcgatatcaggggcgaaggtcattaaagcctattcgagggaagaccgcgtcatggaacaatttttagaaaaaaacgcggcgttacaatcatcggggttttgggcgcagacaatttcgggattcattccgaaagtcatgaactctttaaacaatttaagctttacgattatagcggcggtcggcgggctgtttgcgctgaagggatggatctcaatcggatctatcgtcgtattcgccgaatactcgcggcagttcacgcgccctttaaatgatttagccaatcagttcaatacgatgttatcggccatcgccggggctgagcgggtgtttgacgtgctggatgaaaaagaggagcgggaagatgaagagcatgcgctgtaccagccgatcaaaacgggagagattgaattccgagatgtctccttcggctatcaggaagacagcccgatcttaaaacacctgtccttcagcgttccgaaaggacaatcaatcgccttcgtcggaccgaccggagcgggtaaaacaaccgttacgagcctgatcgcccgtttttacgagccgaataacggaaaaatcctcattgacggaacggacatcaaaaaactgacgagatccagtttgagaaaaaacatggggtttgtcctgcaggattcctttctctttcagggcaccatcagggaaaatatccgttacggccgtctggacgcatctgatcaagaggtggaggcagccgcaaaagccgccaatgcccacggattcatcgaacggctcccgaaaggctacgataccgtccttacccaaaacggcgcgggcatcagccaaggacaaaaacagcttatttccatcgcgagagctgtgctggcggacccggtgctgctcattttggatgaagcgacgagcaacattgatacggtgacggaagtgaaaatacaagaagcgctcggccgtttaatggcgggcagaacaagcgtcatcatcgctcacaggctgaacacgattcaaaaagccgatcagattcttgtgctgaaggacggcgaaatggctgaaaaaggaacccatgccgaacttctcaggcagaacgggttttaccgggaattatatgaaagccagttccgggaatcatagatagggaaaaagacctccgacagagtgcggaggtctttttttgcgaaggcaaatagtacttttaagttattttcgttaaatgtaacaaaattacttgacgtaaataagttatgtatatatactagcttacataaagtaagtgataataattttcaaggaggattttatgaataaatcattcgaaacaggaacactgcttttaagggttgtaacaggtattatcttttttgttcacggtttatccaagtttcaagggttggaaggaactacgcaatttttccagagcatcgggattccggcatttatggtctatgtcatcgctacgattgagcttgtcggcggggttctgatctttttcggtttggcaacgcgcattatcggcgttctgtttgccgtcacattagtcggcgccatcttcacggcgaagctttcctcaccatttatgggcggatcggaatttgatttcatcttactggttgcgtcaattcacttagcgctttcaggaagccgtctgctttcattggatcagctccttttcaaatcaaaaaagggagaaactttttcagcataagaaagaaggcgttcaaatgaccggtattcatcaagatacggcaatcggctatgtcaaaatgaccattaaaaatatggaacgctcgctcggcttttaccggaatgtaatcggccttcaagtcatctcgcagacagatcgttcagcaagactgtcagcagacggaaaacgcgtactgctggtgcttgaagaaaatccaggcgccgtcgttctgccggagcggtctgtcaccggcctttaccatttcgcgatacttctgcctgaccggaaagaactcggtatcgcattggccaggctgattgaaaacggcatcgcgctcggtcagggggatcacgcggtcagtgaggctctttacctgtctgatccggacggcaacggcattgaaatatacgccgatcgtccccgcagcacgtggcgccgggatgcagagggcaattatgttatgcaaacggcgcccgtcgatgtggacgggcttttggaagaagccggagctgaacggaaaagccgtctcccagaaggaactgttatcggccacatccatcttcatgtgacggacttacaggaagccaaagcgttttacaccgatattcttggttttgacattgtcggcaattacgcgggcatgtctgctctgtttgtttcggcgggagggtatcaccatcacatcggtctgaatatatgggccggagaacatgcgtcgccgaaaccgggaaatgcaagcgggctggattattacaccatcgcgctgccgcatcaaaaagagctgtcacgtgtgacaaaagcgctgaccgatgccggctttgagatcgaagaaaaagaagagggcgtattcgtcaaagaccctgtatcaggggcggatatcgcatttacactgtaagaaacaacccttgccgtctaaccggcaagggtttttatttttctgaagtttttcttgaaaaggctcgggaaagaacgtctgtgactgaagagagcgaacatctcagtgaggcgcaaaaatgacgcatggagcccgccatcgccggccggagctcagggcatccgctggattgaaaactgtgtccgttcggcggatcagggtgttgtatgggcagaatttgaatagaaaaaggcaaaagccgcatccggtcacaagatgcggcttttcatatacaatttacaattgtgtgaaaaatgtccaaaataaattgttcttcctgattcttcctgatatgataagccgaaaaaggagaacctgaacaaatgaattcaaatgcagcacagacggaacagccgatgaagcataacggaaaccgggtgacggttaaggactttatcattctagccaagccggggattatcatctcaaattcacttgccgcattgggcggattttggattgcatggcttcagtcggaaaggacgggcggagggcccggtatatttgccgccatggcggttgctatgatcggaacggcgttggtcatggcatcaagcactgtttttaataacttctttgaccgcggcatggacgcaaagatggctcgaacccgcacccgcgcaagcgtcacggggagaataccgccgccggtcatgatcctgtacggcacatgtctcggcgcatgcggattcatcatgcttgcttcgcttaatgtactgaccgccgttcttggcctgcttgcatttttgctgtatgccgtcgtttatacgctttggtttaaaagacaatccgtctggagcacatttgtcggcagctttccgggggcggctccgcctttaatcggttattgcgcgctgactgggtacattgatatgcccgcgattttgttatacgcaattatgtttttgtggcagccgccgcatttctgggcgatcggaatcaggcgaaaggaagagtatcgtgccgccggcattccgcttttgccgattataaaaggcaatcgcgtcacaaaaataaaaatgctgcgctatattgccgttctgactgcggtttcgctgctcgttcctctttatatagacgtcagcccgttttataccgcgtccgctctcctgctcggagccatctggctgtaccggagcgtcaaaggctttcaggcggcggatgacacgcaatggtcgaaggggatgtttttttattcgattgtgtatttcagtctgcttttccttattttaatggctgattcgtttatcaatgcggttctcagaacgtaaacaggcggcttgcagatacagagccgccccgttttgtttatgcttttttgatgagagccaaaatatcttcaagccaggaaatataattccgttcccgctcaagcgcttttgtcagcacgagataatggccgaaatcaggagaagaaaatgaatccgcctccgcggacgatgtcatcagttcttgataactgttttccagatcggacaatttctccttccgctttacgagctgatcggtgaatagctcatccgcttcttcctgcgtcaaagctgagatgaaataagccttcagcataaattcatccttcaccgtttccggaatcgggtcttttttcgtcagccaggcagcaagctccagctctcccttgtcagtcagcgtgtacatttttttctcaagctttgttccttgaatcgcagtgcgaaacgtaataaatccctcagccgtcagtttttttaattccggataaatctggctgtgctttgcgctccaaaactggccgagctcttccttaaaatagctcgatatatcatatccgctcaattcgccttttcgcaaaagccctaaaatcgcgtactttaaaattctcatgttgtcctccaagcccattcatttgacagctagtataccatacggccgctcaaaaacggagaagtgccggatgcttgtaattgaatctgcggcggcaaaatcagcgaaaatatgcagaaaggggttatcaaaaagcctttctcatgtctttgcctcattcatatgacatcatgatataatcattgtaaaaattaagaaatactgggagggacatatgaagacggtgattgtgtatgcaaacccggatgagaacagtttcaatgcggctctcgtaaaatacgtcgtcatggctttaaaggacagcggccgaagctatacggtcattgacttatacgccgaccaatttgatcccgtgctgaagtacggcggcgaaaaaaagcgctctgacatgaaccgggacgctgaaacgaagaaataccggaaactgatgaaagaagcggatcatctcattttcatctacccgctgtggtggggaggcgttccggcgattatgaaaggcttttttgacagagtgcttgtcgccggagaagcctacacatatgaaaacggccgcgtaaaaggactgctccgggcagagacggcacaagtcttttatacggcggattccccgggctggtacttaaagtggttccggaaaaactcggactggattacgctgaaaaaaggcattctgcaattttgcggcattcaaaaagccgagcggaaccttttttctgtcgtcaaaacgagcacacccgagctgcgggaaaaatggctgcgccaagcatacgctaaagtccggcgcgcttgtgaaaaaggagcggccgcatgcagataaaagaaattttcgtgattcgctgcctgtcctgtttaagtgtggttctgcttcatgcagtttcaatggtgctgatgattcaggaagagtccttagccagtgccgcccatacggttgatgcttttcggaccctgttgatgttcagcacgccggcgtttatctttatttcggaatttctgcttgccaggtcatacccgggaggcgttcccgcgggttttttaaagaaaaggggcaaagtcattttcgtgccgtttctgtttattgccgcggtggatgccattttaatgaaaagcgtggcggaagaaggagccggattcgtttcagtgatcggtaaatttttagaaaatgtgtttttaggaaacttcatcggctacttcattcttgtgatctttcaattttacattctccatatgctgctgcaccgctggctgaacaacacatctcccgtgtgggtgctgtctgtttcgtttatcatcaacgccgtctatctggcttacttttccatcgttcatccgcccgtatcatcggggcttgattctatttttccgttcttttgggttccgtttccgggctgggtattttatttctgtctggcattttattgcggaaaggaatatccgcgttttttatcgctcatcaatcagtaccgttatgcggtttacttcagtgcagccgtatcggcaatattgattgtggccgtttcatatatcagcggcggctccatttcctctaagcgtccggatattatgatttacgcggtcagtatgatctttctgtgttttcatctgttttcaaagctcaaaaaagtgcccgcgattgtgatgatgatcagcaactattcgttttcaatctatctgctgcactcctactttttaatcagcggatatcttctggaaggctatttgcggtcaatgcctttgccggctgccatccttcttttatttttgatctgcacgctcggtcccattttcgtatcttgggtgtgcaaccatttcagatacggatacctgtttgtcgggaaagtgtatcagccgaagcagaccaaaagaaatacggcggcgcatcaaggccgcacagtctgaaaaaaaggcggcgtttcggccgcctttttgatatgggtccgccttatccggcacgaggacggatagttgtacatcctgcaaacaaagcccccgcctgcggccgttttgacggatgcatttatgacaacataacgccatcgattttctcccttgtgaagaccgatatattgtatacttataggaaatactttcaaaaaaagtgaaaaagagaaaaactgtgagcttggatgaacgactaaaaaggagcggggacattatgaatgactgtgtcaaaacattcggagaacttccggccgaactttattcctttgcgggaggaaaaggaagcattctctctaaaatgtatcaaagcgggtatcctgtgcctgaagggtttgtgattttgccgtctgcctttcaggacggacagctccgccatcaggcgagagaggctgttgatcaatatgtgaattccatccgcagccgccatgcatctgcgttgtttgccgtacgctcatccgcgctgagcgaggattccgctcaggcttcctttgccggagaattcgatacggtgttgaatgtcaaaacagatcaagacatgttcagggcgattgatgaagtccgccgatcgacacagtcagaaagagtaaaagcgtacagcgccgttcagggaatggaagatgagcatgaaatcgcaatcgtcatccagctgatgataccgtctgacatatccggagtgctgtttaccgcagatccgattacggggagcaggcgggagatgacaggcaattacgtttacggtctcggggagcagcttgtttccggggaagccgatgcctattcttttaaactggcacggcccaagaaaaaatatgacggccccggggaatttcgcaaatatgcgtcaaagctctataaactggcgaaaaagctggaaaaagatcttggagggccgcaggatattgaatgggctgccgcgggcgggacattgtatattcttcaatcccgcccgattacgaccttacaagccggaaatctggaaacctatgaatggaatgattctttcagcggtgattttttatggacaaacaccaatataggagaagcgattcccgatgtgatgacgccgctgacatggtcgctcctccggaatctggatgaagagtcgggcattattccgggctattatgtctggtccggcaatatttgcggcagagcctataacaatatgagccagcctctttccgttcttgccgctttcggtctgaatccgaaaggcggaaaaataggaaaaatgatgagcgatacattgggtgaaatcccggcggaaatgaagattcctttatatccgttctcaaagtatgaacttttgaagatcatcccgaaaaaactgaaaccgtatctgtcgaaaatgaagcaagcgaaaaaaaacatgtcctcctacttggacgaatcgccggagtggtgccggaatattgaggaaaagctgaaacgtgccgaaacggagcgggcattattagcgatatggaacaatgagatctatccgtatttatgcaacgcgtggtttgcgttaatatccggcgggcgtgattctgcgcaatcctcttcgtcgttaacctctcaattaacaaaactcgcagggatagaagatgcgaatctcctgctgtccaatctgaggggaaaaggcggactggccagcctggagccgattatcggcattgatcaagtcatgaaaggccgtatgagcgaggaagaatatctcaggaaccaaggccaccgtggcccgcatgaatacgaactttccataccgcatccgggagaaaaccgggattggctgacgaagcagatcaaagaacacaaggagtcgggtattgatgccgaacaactgcttttgaaacagcagcgggcgcatgaacaggccttccgaagatttgaagaaaagtatcctcataaggtcaaatggctcaaagccaaaatggaaaaagcgtcagaatacgcgaatattagagaaacaaccagatccgaatttgtcagggtgtaccggacagccagagcattcgcgctcagagcgacggaaatgaccggcatgaaggacgatattttcttcctgtatctgcatgaaataaccgatctgctcgcggggaaagagccggcggttgcgtcgattcaagcgagaaagcaaaactatgaaacctataaaaaactgccgccgttcccatccgttattaacggaaggttcaatccgtttaaatgggctgaggatcctgacagaagagcggattattacgatgcttttatgcctgcggaaactgatgatgcgcatactttaaaaggtttcgcgggagcggccgggagagtggagggcattgtccgtgtccttgatgctccggaagacggggattcttttgcggcgggggaaattttagtgacgtcgacaaccaatgtaggctggaccccgctttttccaagagcggctgctatcataacggatgtcggcgcccctttgtcccacgcggcgatcgttgcccgggaactggggattcctgccgttgtcggatgcggaaatgcaacgtcaaaactgaaaacgggggacagggtggccgttgacggcgggcaaggcatcgtccagctggaaccgcggcagactccggccacttctgaagaggaaaatggtaaactgatagaataaaaacatgggaaaggagcagcgcatgaataaagcagttattaacggggagcaaatcagaagtatgagcgacctgcaccagacattgaaaaaggaacttgcccttcctgaatactacggtgaaaaccttgacgctttatgggattgtctgaccggctgggtggaataccccctcgttttagaatggagccagtttgaacaaagcaagcagcttacagaaaatggcgccgagagtgtgcttcaggtctttcgtgaagcgaaagcggaaggctgcgacatcaccatcatactttcataatacgatcagcgggagagagacaaaaatggaaaaacaaaccctcagctatccgattggagaatatcagccggctgaatcgatttcggccggacagaaacaagaatggatcaatgcgctggaacacgctccggccaaactgaaacaagctgtcagagcgatgtcggacagtcagcttgatacgccttaccgcgaagggggatggactgtccgccaagtggttcaccatctggcggacagccacatgaacggctatacccggtttaaattgagcttaacggagaatgaaccggaaatccgtccttatgatgaaaaaggctgggccgatcttcatgattccaaaaccgccgcttgcggggatgcgcttgagctgttaacgatcctgcacagaagatgggccgctcttttgcgctccatgacggaagcccaattcaaacggacatacttccatcctgtatctaaagagacggttacgctggaacaagcgctcgggctatatgtctggcactctgaacatcacatcgcccatattactgagctttcccggcggatgggctggcatctgtcttagaggatgccggcttccggaaatacgccaaaacagccgcagacacaatcgtgcataatgaaatgacggcggctgccgtataaagatggtggtagccgctggaaatgcccgcttcaattgcatcagaaaccgcttttttgacggcgggaacagggattcggctcacttgctcctgcaacgaagaaagtccgccgccgatatcgggcatttgcgcctgatcagcgggaatgccgcttttcgctaaacggtttttgatgtcatctccgatccggtcaaagcccgctgtaatgaagccggcatataaagccggagcgagcgtcagcccgacctgccttacgagtgacagcgtgccgagcgctgttcctttgttttggcccgaagtttctgatacaagcacattcagcggagccccgagcagaaatccgaaaccgacccccgcaatgacactcgctgtgacaaattcccatttatccgtcacccataacggaaacaggctgaagcctgcaaatgcgatggcgcctgatacaaccgcggagaagaccggcccttttttatccgtgatcgccccgccgagccacgctccgattcctgacgccaacgcgagcggcgtcatccaataacccgctttctccgccgatacgtgcaaatattgctccgcataagaaggaataaaaatgaccgcagcgagcagccctcccgataaaaatccgatgacgagcgtccattgaaacactttattttgcagcagcgagtaggcgagaatcggatcgccccctcggttttcaacccgcttttcgactttaagcagcaccagaaagagaagtgccgctcccaaaagatacccgtacacctttacgttcattatgctttctgacagcttcgccccatcgagattcgtgataccgatcatgcaagataagatcgcaagagacagcagcattgtgccggcgaggtcaagccgtttcgcctcaggctctttcgtttcagcgataaacaaaccgccgcacacaaccaaagcggcggcaatcggcagattaatcaagaacagccaatgccacgacccggttacatcaagcaaaaagctcccgatattcggtccgaggacggccgccataccgttcatcgcccctaaaagcccgagagctttcccctgtttctccttcggaagcacggccagtacatgcgaactcccgataataaaaattccgccgccgccaagggcctgaatgagccgtgccgccaaaaacatcgggaagctctgactgagtgcgacaagcaaagagccgagtccgaacaacccgacttcaatcataaacagctttttccgcccgtatcggtccgacagcttgccgacaatcggcacactgacactgagtcccaatgtgtaaagggtcactccccacgatccccatgaaggagaaacatcaaaagagctgttaatcgtcgtcagagcagcggaaataattccgttgtccagcgccgccatgaacacaccgatcgtaaagagagtgatggcccagctctggtttttttctgtttgcaatggctccggcatactgatcaatccttccgtttttaattcacttcgaatatattattcacttcaaatgaattaaatgtcaaacaaaaaaaggccgccgataccggcaggcctttttcatctctatccctgtttggaagaatcaagcgctcttgccaaaatggaaagcccttgattgaccgtttgtttttcttcagcggtcagcgtttccaatgaacgcttcaattttacatgtcctttttgataaaggctgcggaaaatatctttcgcgttttccgttaattgaacgacgactgaacggcggtcttcttctgacggagcgcgtgtaatgaaacatgatttttctaaacggtcaaggagccccgtcgtatttgaaagagaagcgcccattttctccgctatgtcactcaccttaagcgtcccgtggttgttcagaagcatcagcaccttcatttgcggcatgctcatatcaagcttcatccactccgacacatcgccgagccccgccgatgtcatcactttcatgtacagcacccaaatatcccgttcctcaggagaaaaaatatcgccgcctaatactgttgtatcatgcagattataatccatcgtctcacttcctcattcatactcctgcataccatattactgattttaatcagagaaagaaagttgcagacgagttttgtttgaatgtgaggtggtagtgtataatatgttggagattattgggggaattatgataaataagctattttatgatgattggagagaacattgctgactaaaaagaatgccttatcgatattaaaagtattatttcctattgcagttttgcttttagtcatttatcagtccaaaaaggaattgacagacctttcttttaaaagaacgctgtacattattaacgggattgagcgttacgatttatttattctcgttctgctcggccttcttgccgtcagcgcgatgtccttttatgactttgtgctgaaacggacgcttcgcctcaacattccgaattggaaagtattcagggtctcctttatcgccaattcctttaacaatgtccttggattcggcggtctggcgggcatcgggctgcggacgatgctttacaaagaacatacgaatgacgtaaaacgcctcgtcgcaggcatcgcctggcttacgtcctcagcgctgctcgggctgtccgtcttcagtatcctgaccatcgcccgggttctgccggttggagagattacaggtgagaaaccgtggctgtgggctgttatcgccggagtggcgcttattgtgccggcagccttaatcgccgctgggatcaacaataaaaaagctggcgcagaagacggtgaagcaaaaccgaggcatccggttttttcttacatcggggcatcgtttgccgaatggtttgcggcggccgtcgtcatgtattattccctgtatgtcatggggattcaagcggatgtccgccatgtattcggtgtatttgccattgccgctatcgggggaatcatcagccttgtgccgggaggattcggttcgtttgaccttctgtttctgctcggcatgcagaatatgggctttccccaggaggcggttgtgacatccatcgtcatctatcggattgtgtattcatttattccgtttgtgttcgggctgttctttgcggccggcgacttaacggaaaatacgcttaaacggctggaatcaaatccgaagatggcgcctgccgtggaaacgacgaacgtgcttctcgtattccagcgcgctatcttaatcagggtgctttacggttcgctgtcgcttttggttttcatggcgggagtcgtcgtgcttgcgtccgtcgccctgccgatcgacagggagacggtcatcccgcacattccgcgcccggcgctccttgcgtttaacgcgttatcgctaagcgcggctttgattctattaattttgccgattgaattatacaaacggacgaaacgttcttattcaatggcggttgccgcgctggtcggcggttttgtgttcagtttcttaaaaggaatgaacatcagcgcgatctttattctgcctgtcgtcatcgtattgcttgtgctgttaaagcggcagtttatcagagagcaggcatcgtatacgctcggccagatgatttttgcggccgctctgtttattatcgccttgtttaactacaatctcattgccggctttatttgggataaaatgaatcggctcctgcgccacgactatttcgtccataacaattcgcacattacatatgccacgatgacggccattattgttgtgccgctgtttttccttttgtttacgttcttttatcataaaagatcgaagccgatcggagaagaggccgatcctgaacggctgaagtcctttttggcggaagaaggaggaaacgcgctcagccatctcggctttctcggggataagcggttttatttctcaagcgacggcaaagcgcttttattgttcagccagatttccagaaggcttgtcgtgctcggtgatccgtcaggacagagagactcttttccgcttgtgattgaggaatttctgaatgaagcgcataagcaggggctgagtgtcatgttttatcagatcgaacgtgaagatctggcgctgtaccatgacttcggctataacttcttcaagcttggagaagaagcattcgtggatatggaggcctttacgctctcaggtaagaaaaaagcggggctgcgggcgattaacaacaaatttgaccgcgaaggctacacatttcatgtcggggaaccgccgttttcctccgagtttatcgccaagctgaaagacatttcggacgaatggctcggaccgaaaaaagagaaaggtttttccctcggtttcttcgaccgggattatctggaacaggcgccgattgcttacgtgaaagacgcggaaggggagatcatcgcttttgccaacctgatgccgatgtatcaggaaggcgagatatccgtcgacttgatgcgttatcggaaaagcgcgccgaacggtattatggacgcgcttttcatccgtctgtttctctgggcgcaggaaaaaggctataccaccttcaatatgggcatggcgcctttgtcaaacgtaggaacggcttttacatctttctggtcggaaagaatcgcggccgtcatcttcaacaacgtccggtatatgtacagcttcagcgggctgcgggcctttaaagaaaaatacaaaccggagtggcgcgggaaatacttggcgtaccgcaaaaacagatcgctgtccgtcacgatgatcctcgtcacccgcctgatcggaaaaaccaaaaaaagacgccgttaaaaggcgtctttttttaaaaataattgactaaaaattctaatttcactctgttatactgaataacatgatcataaggtgaaaggaaggctgatgaatgaaacaggcaaccgtgtttaaatatgaagcgttttccgatattccggatttgggaaatcccgcgggaatcgtctttaacggagatgattattcagatgaagagatgcagatgatcgccgaaatggcagggtacaatgaaacctcatttctctgtaaaagcggagaagccgatctgcgcatccgctattttacacccggccacgaaatgaatttatgcggacatgctaccgtcgcctctctttacgcattaattgaaaagggaaggcttcaggctgatcagacatatcaaattgaaacaaaagccggcattcttcccgcaaaagccgctgaacgaaacggccgggtatacatcacactcgaacaggctcccccgcaatttctgccgtttacgggcgacaaagaaaagcttgcggcctcgctcggaattacggctgaggattttcacagcgagctgccgattgtttacggatcaacggggatctggacactgattgttccgctgagatcacttaaagcatcacggaatatggtgccggacaacgcacaattccccgctattttgcgcgatcttccgaaagcgagcgttcatccgttttctcttgaaaccgttcatccggaaagtgatctgcacggacgccatttttcttcccctttctccggtacgaccgaagatcccgtcacgggaaccgcttcaggcgtcatggcggcctatatgcggcaatacggaggctccgaagccgaatgcctcacgattgaacaaggccaggaaatcgggaaagacggaaaagtggaaatcaggattacagaagataacgaaaagatgaacatcaagatgacgggaacggccgtgtatgccgaaacaatcaattttcagcttccgtaacggtttacaaaagccggtcgtatccgttatattataaatgataatcattttcatttggataggaaggtgaatcggcatgccgaaaaccgaacaattacagcaaaacgaaagtcttgcacatacaatcagaaacagaagatccatccggtcgtttaaaccggaaaccgtaccttctgaagtcatattagagatgcttgaaacggccgtttacgcaccgaaccacagactgacggagccatggcgttttatctacgcagcaagcgaagcgggaaaagcaaagcttgcggacagctacgtctcatttttcaaaaagataaaagatgatttcaacgaggaaaaagagcggaacatgagaaaaaacctcagcgccgttccgggatttttactggtcgtcttaaaagaagatgaaaatgaatttacgagaaacgatgatttcgcggcgctgagcggcatgattcaaaaccttcagcttctcgcacattcaaacggcatcggcatggtctggaaaagcggccgcatcatgtatgacaaacaggtgcaccaagacttcggtcttgctgataatgagcgctttgccgccatcattcaaacgggctatccggacgaacagcctaaggcgaaagaacggacgccggcaaaaagcctgtttaccgaactgtaaaaaaaatccccgtctctatacagaggcggggatttcgtattagcgggttttgcttttagctctgttgtcagcggctttcatccgcgcctgcgcttcgcggtcagcggaatcagcaagctcgcttgaatattcctcgtacgtgccgtctgtttcgcgtttcaaagcatccggaacttgaggaagtttttgtttgtttttatcacggtttttgtgagtatgatttctgcccatatcaatcgccccctgaaaaaagtgatatcaaacaaacatagtatctgcccggtcctgatctttattcagtttatttccgtttggctgctctttccgcttttttgaattcaccggaataaaggacttcctgcatttttttcagattggctccctgctgatgtttttcgcgcttcttttccataaaagaagaccctccttcaaaacagaataccaataggattggcttttatttccgtttttatgcagataagagatcctttaaagccaaatcaagttcttcatatgtaaattgaaaaccggatgtcagcgcctgcttaggcagggcgcgctggccttttacgatcagcaggctcatttctcccaaggtcttctccagaaaaagttccggtacgggaatccaatgggggcggtgcaggacgcttgcgatcgtctttccgaattgcttcatttctacggggttcggcgatgtcacattcatgggaccggacaagtcatcatgctccgccgcataagcgatgagtcccgcggcgtcatccacatgaacccatgacagccattgccgtccagagccgatggtgccgccggctaacagcttataagggagaaccatgagcggcagggcgcctttttcaccgagcatcaccccgaatctggcatataccgtccggatgccgagcgcttcaattttctggccttcacgctcccacatacgagccgtatgactgagaaagtcttcatttgacgtatcggactgttcggtgaacgttttttctgtgcttgtgccgtaaatgccgacggcgctggcctgaatcaaagcccggggttttttcggctgctgcttcataatccgtctgacttctctcgtcgcttctattctgcttgagatgatttgttccttcgttgtgtccgtccagcggtcaaagatggatttgccggcgaggttcacccatacatcaatagggggaagctcgcgctcaggcgccgcattttcggccagccattgaacatatgtcacatttttttgttcggtttctctctgttttcttgataaaatatagacatgatgtccccggcgggtaaacacacctgtcagatgccggcccagaaaaccagtgccgcctgtcatcgcgatattcatatccatctctccttacacgttgatatatatactgtacctcatttgccaaaaagaaaaacgcctgaacatcggggcggggaaggagaccgggatgccgtttattacaaaaatatcgacccaaaagaaaaataccgagcgcttcaacatctttcttgatgagaaatatgcattcagcgtcgacgccgacgtgcttgtgcgttatgacctgaaaaaagggaaagaactggacgagcttgacattcttgaaatccagtacggcgatgacgtgaaaaaagcctttaaccgcgccgtagaatttttatcataccggatgcgctctgaaaaagaagtccgcgatcatctgaagaaaaaagaaacaccggacatggtcatttctgaagtcatccataaactgtacgattaccgctacttaaatgacaaagaatttgccgaagcctatgcgagcacccacaaaaaaacaaacggcaaaggccctgacgtcctgttccgcgagctgaaagcgaaaggaatagacgacgataccatcaaggagacgctcagtgcgtttacatttgatgagcagatacaagaagcgctgaaacatatcagcaaaatcctgaaaaaggacaaaaagctgtccacaaaagagatcagacagcgggcgcagatgcagcttcagcgaaaaggtttccctttcgacgtcatcaatgccgctctggagcagacggagtatgaaaatgatgatgaagccgagatggaagctctgaaggctcatgcggaaaaagcgatcaggaaataccgctatgacggcagctatgaaagcggaatgaaggttaaacagtacttattcagaaaaggattctcgattgacgatattgatcaattcttgcaggaagaggagtaaactgaaatggacaaacgatacagtcaaatgacgcctcatgaacttcagacagaaattgcgggactgacggaaaaagcgcgaaaagcggaacagatgggcattgtaaatgaactggccgtgcttgaacggaaaattacgatggccaaagcttacatgctgaacccggaagactttcggcccggcggggtgtatcagatagaaggttctgatgacactttccgcattgattacatcaacggcgtattcgcctggggacacagatcttccccgtcagacggggaagaagcactgccgatttccgttttaaaagaaaaaaaataacaaaagaggccggttccggcctctttttcttttcgggcacattcgtttcaacctttcagtaaaaaatgattgaattcatttttgatatcttttaagatggaattcgttgttttttaaataaaaaggaggcgatttgcgttgaatatcaaaatgaaacagccatctgtgaaattaatgatttttgttttaatgatctgcacattttccatcgggtatacggaatatgctgtcatgggtattctgacgtcgattgccgatgactttcatatacatgtatcttcagcgggcatgcttgttacggcgtacgcggcaagcgtctgcctgacgggcccgatcgtaaccattatcgcggttaagctgccgagaaagccggtgctgctggggttgatgggcatcttcgtccttgccaacctgatgagcgtctttgcgccgaacttcgccgtgctggcgatttccagaattttatccgcatccatccacggagctttttttgcgatcgccatggtatttgcgagtgaaatggtgccgcctgaaaaacgttccgccgccgcggcttccatgaacggcggattaaccgtggcgctgatgctcggcgtcccgttcggctcatatttaggagatgcccttaactggcgggccgtctttttcattatttccgttttaggcatgatcgggctgatcggactgatgctggtcgtaccgaaccggaaaccgaaagtgattccgatgctgatgaatgaatggagtgtctttaagcataaacaagtgattttttcctttgcgatcaccattctcggctactcaggcgtatttatcgcttacacgtttattgagccgattttaagagattcagcggggttcggcacagtcggcattacaggcgcattatttgcctacggtctcggcggagtggcggggaatttcttcgcggggaaagtgccgctcaaactgctgacgcgcacgatgatcggtgtgatgatcggcttgatcggcgtcttggcgatttttccttatatcgccgtttttccagccgccgcggtttcagcgacatttttattcggcgcatgtgcgttcggcacgccgccgcttttgcagaccaaggttatttcttcttctgaaaacggcacgacaatcgccgctgcggtgagcgtttccgcctttaacctggcaaacgcgctcggcgcctggatcggcggattgattctcggcggaacgggatcttactcatggctgtttgccggcggtgcgctgatgacagctctcggccttgtgctttccacgttcgctcatctgtctgagaagaaagatgtttatgaatatcaagtgcataaaggataacaaaaagcttgcaggggatattccgcctgcaagcttttttcagtgtttcaatgtaatgctgatcaccgtatgtttatcactctcagctaaggaaatattccgggtttccggtactccgtctttttcaaaaacgacggcataggttccttttgcgccgcttttccatgcaatctcgccgtggtgatcagtcttgcctattatctctccgcggtctatattcggctgatgatctgactccgccgctttcatcacggtgaccgtcacaccggccgccggtgaaccgtctgcatcctcaacacggagcgtaacgggcagtgcttttttggcggcggaatcatccgctttgccgcatccgcataaaacggccgccgcgagaaagaaaacaaaagctttattgatttgaccaatattgaatgttgtcgaatacactgtttgtcacccttgttcccagattgtaagacgacccgccgtttgtatgaatggcaatggcggtctggccggtgtcgctgtaattgcggtaaacgggcgatccgctctgacagccgaacgtatctgtcgtgtaggtgagtttatatgtctcggcagaacgaatcggtttgctgtccgaccacatggaaccggacactttgtcgcacggatatcctgtcacggttgaggaaagcccggtcggactggaactgttggtcgtccggtagccgtaccagccgacagtattcccgggcgacccgtttactttgattgcgccgtagtcatagtttgtgtcaccgttttctgtccaccctttgacactgtagaatgtctttcctgaataagagccgtacgggtacgatgacccgttgcggccgggagctgccgtaattttcgatgcccagccgtttttctggtcatacacgcaatgtcccgccgtaacgatcgtgtcggcattgacaaaaaaaccggtgcatccgtaggtgcttgtgctgccgctgtatgtgacggtcagctgtgctgtcgcgcgatatggaaatgatgttgtaggagaaattctgattcgttcgtctgtcccaataatactggaaggctttaatgacttgatgtcagctttgctgttttgtgcaagctgtcttttggtgaggcccgttccttcataagcgggggatgtctgtgttgtttgtacaggctgattcagattggcgtcaaactcctcaccgctgtttgatacagatgtctgcgggctgcccgctgcttcagctgaaacagcaaataatgaaactgacagtaagaatgcggtaaggctcagcaatcgtttggaaactgtcttcattttataaaacccctccttttttgtctaccggctttcggttgaacatttaacatattatggaatttatttagcgttatgaccgcaaaaggatgtttttttctgcaaaaaaagagaccggctcattcccggtctcttacggtgtgtgttatcgtctgcctgaagctctcatgcgctcttgcgggtgcgaattaattgaaccgtccgcccgtttagaagcgtagtcatcctttgcccgcggttcgccttcaaacttattattgttctgattaggaaatccttttgccttgttccggaccatttgttttccccctcggccaatatcaaaaggttgcgccttctggattgaagacgtaaagttagtatatgcctgtgacaagctgcgtaaaagcagcaggttttcccaaggaaaggagacagagacatgaatacatatatcgacaaactgacgaatttgctgcttgagaaaaatgacatgctcagctatttgcaagcgcgaacttgggttgagcttttatggggagatttcgaagcgacttacgcaaaagccggccgcccgtatcaaggagagcaaatgacagaacgcgtcgtcaaggaatggatcgaatcatacggcagcaagctccatatgttccagagcgttcgggaagacgtttctcattatttggatcaaagcaggggtctcctgcattaacatagcagtgcgcccgccggataccgtccggcggttttttctttttataaaagaaatgggaaaatcatgtttgacgacccgcggaatgtggaaatgtgtaataactcataaaatagcggggaggaaccacaatgaacatgaagaaggggttaaccgcatttattccggccgcaggactttgcttatttttagccgcaggcaccgtgttttttgatccggcagcgaatgccgcagcagtgcaccagacaaaaatagacaccgcagcagatacatatatcgtgaaagcaggagaacttaacgtccgcaaagaaccaaataaacaagggtcgattatcggcacgcttcgttcagaggattccgtaaaggttaaacggcttcaaggagcagattgggctgaaattgactacaaaggtcacaaagcctatatctccacacattttctgatgaagcagccggtgaaggcggtgacggcgaaacaaaccgctttttatacgccgactttggaaaccggcaaaaaagggttcgttaaagcgggtgaaaccgtcaatgtgctcggctgggggttcagccatgacggagggtttgaccgtaaatgggcgtacgtcatatacggcgggaaagcaggttatgtgaaaacggccgacttaaatcgaaaataaagattcaggcaggcgaatgagcctgctttttttctgaaacctttcgcctttcctttcgtaaaagatgaaaaggagagtgacggatatgataatggcaatcggcggccttctgatggctgcggccggcattttagtcacattttttccgccgaagtcgatcaacagcctgtacggatatcggacgaagcgctctatggcggatgagtcgcagtggaaagaaggcaatcgattcagtgcgctcctcatgattttgttcggccttatatcggcggcagctggatttgcgggcagcctgcttatccggctgactcagccgttcgccctgatcgttcaggccgtattgttgattgcgatcagcgtactgatcatcgtcttaacagaaagaagattgaaacaaacggggaggagaatcgatgaatgacattacgtttcacatgatcgaaacaaacggagtgacgctgcacacggcttcagccggtccgaaagacggtcctttggcggtgctgctgcacgggtttccggaattctggtacggctggaagagccagatcaaaccgctggcggatgccggataccatgttgtcgtgcctgatcagcgcggctataatctcagtgacaaaccggagggcattgaaaactataccattgatacgctcagagacgacattatcgggctgatcactcattttacagatgacaaagccgtcgtcatcggacacgattggggaggagccgtggcctggcatctggcatccacgcggccgcaatacgttgaaaaattgatcacggtcaatatcccgcacccggcggttatgcggaaggtcacaccgttctacccgccgcagtggaagaaaagctcttatatcgctttctttcagcttccggaaaagccggaacggagattgtctgaagacaattaccgcgtattggatcacgcgatcggcttatccgaacgcccggcgcttttttcacgggaagatgtcgacagctacaaacaggcatggggcagaaaaggagcgctcacggcgatgctgaactggtaccgggcgatcagagccggcggtttaggccctgccgttccgctaaaaatgcccgttccgtaccgattaatatggggcgtcaatgaccgcgcgctgagcaaaaagctcgccaaggaaacaaaacggatgattccaaacggcgacttaatctttatagacgatgcctcacattgggtcattcacgaaaaaccgcgcatcgtcagccatttgattcatgaataccttcagcaataaagtctgtcccgcgtacagactttttctttttttttctcatatctgccgaaaaacatgacaaaatataaaccatatgcagaaaaaattttctgcccgtgtaacaaaaaaagggtttaaacgtcattaaaaaaaggaaaagccttactgaagttttgcggacaattcctttaaggccgtcctaaaaaaagaataatacaaagaaggtgccttcatgaaacaaaggttaatctcaattattattccgtcttacaatgaagggaacaatgtcaagctcatccatgaatctttaaaaaaagagtttcagacgattcattatgactatgaaattttctacatcaatgacggaagcgcggatgacacccttcagcagattaaagaactggccgccagaaaccatcgcgtcaaatacatatctttttcccgcaacttcgggaaagaagcggccattctggcaggatttgaacacgtgcagggcgaagcggtaatcgtgatggacgccgatctgcagcatccgacccatctgctgaaagacttcattcaaggctatgaagaagggtatgaccaagtcatcgcgcagcgcaaccgaaaaggggacagccctgtgcgttccgtgctttcttccctgtattataaatttatcaacaaagccgtcgaagtggatctgcgtgacggggtcggagatttccgcctgctgagccggcaggccgttgatgcccttttgaagctgagtgaagggaaccgtttctcgaaagggctgttctgctggatcgggtttgaccagaaaatcgtgttttatgaaaatgtcgaaaggaagaacggcacgtccaaatggtcattcagtaatctgttcaactacggaatggacggtgtcgtctccttcaacaacaagcccctgagggtatgctttttcaccggtattctgatacttcttctgtcgatggtttatattgtaacgacctttgttcagattctgacacacggcgtgtccgtacccggatacttcaccattatttccgccgtgctgttcttagggggcatccagcttttgagtctcggcatcatcggagaatacatcggccggatttactatgaaacaaaaaaacgcccgcactatttaattaaagaagcgaatataacatacggagaacaaaatgaaacgaattatacaaaaaagcgcaagtggaaccattaaacagccgccgctgtgcgcagggtctggggacgttgtatgaaaaaaaataaatggatcttgccggcagcctgtgtgctggctgcggcagccgctcatatttttttcttaaaagagtggtcggcaggccgctatatgacggggtctggagacgggatcgcccaaatggcggtcttcaaaaagctgctgtttgatcaatatatgaacggcaggctgttttacagctattcgttcggactgggcgggggagtgtacagtcagctcggctattatttctctacttcttttctattcctgtttatctccgccgctgtccgctttttgcagcttattcagctgacgggcgaggctgatgcgctgttctgggcgcaggcctccgtttttatcagcattgccaagcagagttttatcatattcacggcggcgtgtgtattccgttatttcgtcaaacggacggtgcctgcttttgccggcgccgtgttgtacggggtctcgattatctacttccggcatgaggtatattgggactttttcactgacagtatggtgtggctgccgctgcttgtgttgggcgcggaaaaaatcatcagggaaaaaaagccggcgtggtttatcttcgcctgtgcgctgacattgatcaacaacttttattttgcgtatattaatctgattttcatcggcatttatatcttattcaggtgggtgatcccccttgaaggcaatgaggcgaaaaggctcactcaatgcaggatatttattctgtcgggtcttctcgggttcggcataagcgcagtttcctttattcctgtcgtatacggataccttcataatctgcggccgccgtattcagagcatattgcttggcttgatttttccgacaacattttattttcaagccggattatcatcctgccggcggcttttttgctttttctatttacatttactttatacaaaaaccgcttgttccggctgtttgcgggaatcagtctgctgtatattctgtttcacttcagtccgtttgcggcaagtgcctttaacggtttttcagctccgcagaacaggtttgaatacgtcctctgcttcacgattgccggaacggtttcagccgggctttctaagctttcagacatcagcatgaagagtatgctgatgtccgccgtactcgtcgttctgctctattggagccaggtgaggcggtacagtctggatatttctgatcacgccaacctgcccgtcatccttcttctggtgctgagcatagccgctttctttgcagcaaagacaagactgaaaggcgcggtgcccgccgtctatgccgtcattttgcttacggctgtgcttacggctaatacatatgaaaaatatgctttatcagaaggcgggaagatttatacggtatcgcatacatttatgacgggtgctggctataaaggcaaagaacaatcggagctcattcagcgtctgaaagaaaaagaccctgatccgtttgcccgtttagattggatgaacggtgttttcaataacaccccgatcatatacgggttcaacggattcagcgtatactcaagcatactgaaccgtaatctgctgtccttttactggaacgacctccagattgacatgggcagagaaagcgtcagccgctatgcgacattaggaaacagggctaatttatacagcctgctttacggaaaatattatatgacggaaaaaacaaacgaggccggcgtgccgtacgggttcaaaaaaatcatggaatcaaaccattatgcggtttatcaaaatcaatatgtgcttccgttcgtacggacagccgatcgcgtatataacgagggcggcctgaaaaaagctcccgcccttgccagggaacgggcaatgcttgacgggatcgtcatgaaatcaagcacaatcaacacgaaaaaagcgcctgaggcgaaaaatatgatccgccatgcagaggtagcggccgaacatggcgattatcataacggcatcctgacggtaaacgaagacggcggcggcctgatcattacgccgcaagccgctaagatggacggcggcgattattacgtcagcttttatttgaagaataaagcgaaggaccagggctttacattaaaagtgaacgattacacgacaacgagaaaatcgaatcaatccatttacaaaacaggtgtcaacgatcttactgtgagagtgccgaaaacaaaaaacatccaaatccgtctgccgaaagggtcgtatcagcttgacagactggcgctttatgaagaacggtacgatacgctgaaaagcgtataccgaaaagcggaaaaagaaccgccggccgatctcagctggcgcggaaatacgcttcatatctcgtatgaaaacaaaacccgcgcgccgtatatcatgcttccgattccatatgaaaaaggctgggagctgaagataaacggcagacaggagcagattgaaaaagcggattattccttcatcggatttaaagcgcaaaaaggaaaaaacgatattcaattaacgtattacccgccgttttttaaacccgcggccgctctatcggtgatcagcctcgtgtttgcggctctatatgtgagaagacaaaaaaagcccggctcttaaacagagccgagctttaattttttctgcagtttttcctcgctgaaaatccagcccgtgtaagaagagagaagctctaaatcatgactgaggtggacgatggcgacaaaaggatagtggcctttgctccggtagcgcaaatcaataaagcgcacctcataatgatctttaaaggtatcgacctcccacctgtaaacgggggaaaatgaaagaaaggctgcaatattttcgtcctgtttcgcggccttcatcacatcggtttccggaacgggcacgcggttgaatgtatccaatatcacgacatggccgtcaaggcttctgccgacataaaaggcatgcgccgtcgtcacggcgatacgccactgcctgaatttcatcgtcggcgaaataatgatggtttcaatctcctcttcaatcatttcgcgcagccttcgctttatccgcagctgcatcaaaaaccggacggcgtaatatcctgcgaggatgatataaagcatcagaaatgtcacgcccggatgacctccgatataccacacagcaatcgcggccaaatggctgacgaaaataaacggatcaaaggtattgattaaaccgagagcgatccattttctcgaaaacgggcggatggcctgtgtgccgtacgcgttaaaaatgtcaacaaacacatgcaacacgacagcgaggagcgtccacagccacaggtgcaaaaagttcgcttccggataaaacataaacaaaatacccggaatcagaacggaccaaaataaaacggcgggaatggagtgcgtgaaccctctatgatttcgaatataaacggcattatttttcagcttcaatatggtatcaatatcaggtgcctgagagccggcaagagcggcgatcataactgcctgagacatgggggtgtgcatgccgacggcaggatcaagagttgcgattccgccaagcgcgatacccatgacaacgtgagtgccagtatccattgttgacctcctagcaggcgttaacaatcagtcgcccgcatatttcgcattataagatattccccattttctgtttgcccaatcatggcgtttatccgccgttctcatatgtttccgctttttctttatcactatttaatgtaacatattatcgtaacgtgccctaagtttacaccaaaatacggtgtcaagaaaagcggaacccgaaacatctgaggagaagatatgaacgcacttgaagaaaaaatgaaacaaaaagatatagacaaatttcgcgaggacttaattacatggttcgaaagagaacagagaattctgccgtggagagaaaatcaggacccgtatcgggtgtgggtgtcagaggtgatgctgcagcagacgcgcgtagataccgtcatcccttatttccggcggtttgttgagcaatttccgaccgtttcggcgctcgctgaagccgatgaggaaaaagtgctcaaagcctgggaagggctgggttattactcccgtgtaagaaatctgcaaagcgctgtaaaagaagtgcatgagcgatacgggggagtcgtccctgccgaggaaaaggaatttggcggactgaaaggcgtcggcccttatacaaaaggcgccgtgctcagcatcgcatacaacaaaccgattcccgccgtagacggcaatgtgatgcgtgtcatgtcgagaattctttccatatgggacgatatcgcaaaacctaaaaccagaaccattttcgaacaggcggtatccgctttcatttctcatgaaaaaccatctgaattcaatcagggtttaatggagctcggcgcgatcatctgcaccccgaaatcgccgtcctgcctgctttgccccgtacaaaagcactgctcggcatttgcggaagggacagagcgggagctgcccgttaaaagcaaaaagaaaaagcccggaataaaaacaatggcagccgttgtgctgacagacgatcaaggcgatgtctatattcataaacggccgccaaaaggcttgctcgccaacttgtgggagtttccgaataccgaaacccagaaaggaatcaaaaccgaaagagagcagcttgaagcctatttagaaaaagagatgggaacaaccgctgaaattggggagctggaaggcatcgtagaacatgttttcacccatctcgtctggaatatttcggtctttttcggtaaagtaaaacaagtgtcggatacaacggaattcatacgggtcacaaaagaggagctcgaggaatacgcatttcccgtatcccatcaaaagatatggaaaatggcggaagaaagcggccgcctgtaaaaagcgtcagtcatagctgacgcgagtgccgtggccgtaatccgcttcattccgtttcagtccgccgcgggcttcgatttcctgaatcagttcccggtatttggactggccttcttcgtttaaatacggcataatttgctggaaggcatgatggaaataggcgagctctgaatctctccaatcttttttgggcatcatggccaattcgcccatatcacgtccgacatacatataaaagacccctttcaacacatattgcttttattgtttgttgaatgaaaagaactatacacagcaaggagctgaggaaaaatggaacaaaataaatgcgcactgatcacgggaagcagccgcggcgtcgggaaagcagcggccatcagactcgcggaaaaaggatacaacatcgtcatcaattacgcccgcagtaaaaaagcggcattagaaaccgccgaagaaattgaaaaactcggcgtgaaaacgctcgtcattaaagccaatgtcggccagccggcaaaaatcaaagacatgttccgccagattgacgaaacattcggcagactggacgtgttcgtcaataatgcggcttcaggcgtgctgagaccggttatggaacttgaagaaacacactgggactggacgatgaatatcaatgcgaaagcattgcttttctgcgcccaggaagcggcaaggatgatggagaaaaacggaggcggccacatcgtcagcatcagctcgctcggcagcatccgctatcttgaaaactatacgacggtcggtgtctcaaaagccgctttagaagcgttaacccgttatctggcggttgagctgtctccgaaaaatatcatcgtaaacgcggtgtcaggcggagcgattgatacggacgcgctgaagcatttccctaacagagatgaactgctggaagatgcccgccaaaatacgccggccggcagaatggtcgaaattaaagatatgatcgatacggtggagtttttagtttcttcaaaagcggacatgatccgcggtcagaccatcataattgacggcggacgctctctgctcgtataagttttaaaaaagatgaatagccttatcgtctcctgcgcattctaaagtgcgtggaggtgataacaatggcaaactcaaaattcagcaaaacagacgttcagcaggtgaaaagacaaaaccagcaatcagcttccggtcagggtcaattcggcactgaattcggcagtgaaactgatgtgcagcaggtaagaaagcaaaaccaatctgctgaacaaaacaaacaacaaaacagctaatcactgaaacgaaaaagcacttcatcttcggatgaagtgcttttttttgttgccaaaacgacaaaacttgtgattcctctacagaatgagtcaaagggttttccggcggaaaatcgaaatggtaaggagtatcaacctaaaagcctaaggaggaacccgatgtcagagtttgaaaagcttgtaagtgaacagatgaaaatcatggatcagcttctcgagctgcagtcagaacttgaccgctgccggcaggtggaagcggaactcatcagtctggaaagagatgcaaagctggacaatgtacaggacgaaattgcgacaaagcgaaaagacctggccggcatacaggagttattccaaaggcagacagagcaagtcatccagtcttatcgcagcacggaaaagccgtcttcctatgtgcagaaatgaatgtgccattccggaagcggagtggttcttttattttcattttttaattcgtaacgttataatagtgaaaagacttgtcggaaagcaattgcggctgcattgactgcagggctttacagaaagtaggggagaaatatggggtatcccaaggaaggagaaaccattcaaattcacagctataagcataacgggctgcttcatcgaatttggaatgaaacgacgattttaaaaagtacggaattgtgtatcatcggagccaacgaccggacaatggtgacggaatccgacggacggacgtgggtgacgagagaaccggcgatctgctactttcatgcccgtcagtggtttaacgtcatcggaatgctgagagatgacggggtgcactattattgcaacatcagctcgccgttcgcttatgacggagaggccatcaaatatattgattacgatttggatgtcaaggtgtttccggatatgacgtataacattcttgacgaggatgaatacgatgaccaccgcaaatcaatgaattaccctaaagagatcgacagcattctgaaggagtatctgaatacgctgctgcactggattcatcagcggaaaggaccgtttgctccggaatttgttgatatgtggtatgaacggtatctgcgctatacaaaataaagatacaataaaaaacctgttggggtgtcaacaggtttttcacatgggctcacacgccttaaagagagagggggataaagtgtgggcgtaatcagacgctatatgcaatttgtaaaaccttataaaaaacaaatttttatcacagtgttaatcggcatcataaaattctccatcccgctggctctcccgcttctgttaaaatacgtggtcgatgacattattcaagggagcggaacggcaagcgctaaaacatcatcgctattcacgataatgggcatcatgttcgtgctgtttttaattctgcgtcccccggtagagtactatcggcaatacttcgcgcaatggacgggcagccgggtgctctacgatatcaggggggtattgtttgatcatattcaaaaattgagcctgaggttttatgccaacacgagaacgggcgaagtcatttcccgggtgataaatgatgtcgaacagacaaaagactttgtcataacgggactgatgaatatctggcttgatatgatgacggtgctgatcgtcatctgcattatgtttacactcgatgttaagctgacattgatatctgtcattttgtttccgttatacggaatttcagtgaaatacttttacggccgtctccgaaaactgacacgtgagcgttctcaggcacttgcccaagttcaaggacatttgcacgaaagagttcaggggatgcccgttatcagaagtttcgccattgaagattatgaacaagccaattttgatgaaaaaaacggacattttctggacagggcgatccgtcatacgaattggaacgcaaaaacgtttgcagtcgtgaataccattacggatttggcgccgctgcttgttatcgcgtttgcgggttattttgtcataaacggtccgctgacggtagggacgatggttgcgttcgtcggctatattgacagaatgtacaacccggtcagaagattgatcaactcatcgacgacgctgacccagtcgatcgcttcaatggatcgcatatttgaatttatcgacgagccgtatgaactgactgataaaccgaatgcactaaaagctgacgacattaagggcgaagtcgaattccgaaatgtctcgttccgttatgaggaaggaaaagaaacgattttgcaggacgtttccttaaaggtgacaaaaggggaaaccgtcgcgctcgtcgggatgagcggcggcggaaaatcgacgcttgtcagcctcataccgcgtttttatgatgtatccggcggcagcctgctgattgacggaacggatattcgcgagtatgaagcgaggagcctccgcaatcaagtcggaatggtgcttcaggatacgtttctgttcagtgagacgattcgtgaaaatatcgccatcggtaaaccgggagcgtctctggatgaggtggttgcggctgcgaaagcggcaaatgcccatgaatttattatgaatttccccgaaggctacgaaaccaaagtcggcgaacggggcgtcaaattgtcaggcgggcagaaacagcggatttccatcgcgcgtgtattcttaaaaaatccgccgctgttaatcttggatgaagcgacatcggctcttgatcttgaaagtgaacactacattcaggaagcgatggaaaagcttgcgaaaaaccggacgacatttatcgtcgcccacaggctgtccacgattacgcacgcggataaaattgtcgtcatggaaaacggcgccgtcgtcgaaaccggcacgcacgaggaattaatggcccaaggcggccagtacagacacttatttacgattcagaatttgaactgatacaaaaacttatgccgtccgaatgggcggcataagtttttttgaatgcaaaaaaacccggttttacggaagcaccgggttactcttcgtctgtttctaattcgctgtcttccgggtggtatgtctgaaaactcgtaattaatgtatcgagatgctccagctgctcgcggtattccgcaaccgcagccataatgctgagcatattgtaatcaagcagttcatcctcgcagttctgctgatttttcaagaaagacttcgtcaaaagctgtttatatcttatgctttcttcagcatcgtcatcatgcggtttgatcttgccgaccgtccgcatcagaatcctttcgtgccaatgaagcagataatcaatttcttctgtcagcgtctcctgaaattcctccggcatatgataaatctcgttttcatagcggtgcagctttttcagcgtatcaagcgcccgattcgccgtaataatcgcctgtctgaataaaacaagcttgcgcgactttacatacgtcgttttcttaaagtagcttctctcctctttataaagaaggtacgtatgatcaagcttcatcatcttttccttcagcttctcaatatcctctttcaatatcgagtgttccgtggactggcgcatcgtcagcctgatccatttcatgatctcatcggtatattcaaccgtatgatgagtcagcttcgtttcgtatttcggcggaagaaacacaaggttcacaataaaagaagacagcacgcctaaaataacggtgcttgttcgtatcagagcgaacgtcaggaagctgtttcccggtgtttctaaaattgcgataaccgtcacgagcgcaatcgaaatggtgtgttcaattttcagttttaacatgatcgtgatgacaatcactgcggtcaatccgatcataatcggactcggtccgaaaatcagtccgaatgccgtagcgatgacagcgccgatgatatttgcctgaacctgatcaataataataagaaaagacctgtaaatagagggctgtatggcaaatatagctgcaatcccggcaaagatcggcgacggaagtccgatccatgatgctaagtagagcgcgagcgtaatcgcaatccctgttttaaaaatgcgggcaccaagtttcattggtttgtgcgtgcattcctttctctaataaattatgtgccgaacgaacggctgacacttacatttccctgtcggctgatttgctaaacaataaagtaatatacagggatcataccaattattcaaggtcttttttttgaaaaaaccattatctcacaaatcggacaaaaagaacaagcggaagccctgggctcccgcttgtttcagcagttattttttcatatgtctgaacgcatcttcaacggcttgtaaagtggcgtcgatatcctcttcagtatgtgcggttgtgataaaccaagcttcatacttcgatggagcgagattgatgccgcgctcaagcatcagtttgaagaacttggcgaatgcttctccgtccgtattttccgcctgctcgtaattgacgatcttttcatcagtgaagtaaaccgtgagcgcgccttttaaacggttgacggtgatggtaatgccatgtgtctccgcatgggtgagaatgccttgctcaagtctggcgccgagctcatcaagccgctcataaacgccttcttccttcagcacttccaggcaggcgatgcctgataggatagatgccgggtttccggccatcgtgccggcttgatatgccgggccgagcggagcaacctgctccatgatctcttttttgcctccgtaagcgccgatcggcaagccgcccccgataattttaccgagcgccgttaaatcaggcttcacttgaagaagatcctgcgcgcctccgtacataaaacggaacgccgtgatcacttcatcataaatgacgagcgcacccgctttatgggtcaattcatttacctgttctaaaaatccttcttcaggttcaacgatgccgaagttgccgacgatcggctcgacgagaaccgctgcaatttccgaaccccatttatccagcgcggctttgtagctttcaatgtcattgaaaggaacggtaatcacctcattggcgatgcttttcggcacgccggcggaatcaggggtgccgagcgtagacggaccggaacccgcagcgacaagtacgagatcagaatggccgtgatagcagcctgcgaatttaatgatttttgtccggcctgtataagcgcgtgcaacccggatcgttgtcattaccgcttcagtgcctgagtttacgaatcgtactttatcaagtgaaggaatggcctccttcagcattttggcgaaagtgacctcatgtttggtcggcgtcccgtacagcacaccgttttccgccgctgttttaatcgcttcagtaatatgcgggtgggcatgtccggtaataatcgggccgtaagccgctaaataatcgatatactgattcccgtctacatcccagaaataagcgccgttcgctttttccatcgcaacgggtgaaccgccgcctaccgctttataggatctggacgggctgttcacgcctccgacgatatgctctaacgcttccttatgaagttcaactgattttgtatacaaaaaatgaccctcctaatatctccttacatcatgttctattgtagcatgcttcattgcgagcacaacgggttcatgcttccagaaaagagcggggggggtaacggttgtaatcttaacgtcaattggatacgcttaataaaaaacccggaggtataagaaatgacgattgaaatcggacaaacagcaccggatatgaaattagtgaatgacagcggggaagaagtagcattgacggattttaaagggaagtacgtcgttctctatttttatccgaaagacatgacatccggatgcacgacggaagcatgtgatttccgtgatcagcacgaaagtttcgcgggacttgatgccgttatcatcggagtaagccctgacagccgtgacaaacatgaaaaatttaagcaaaaacacgatcttcctttccagctcctcgttgatgatgagcacaaactggcggaagcttttgatgtgtggaagctgaagaagaattttgggaaagaatatatgggtatcgagcgatccacttttttgttagacaaagaaggccgtcttgtgaaggagtggagaaaggtaaaagtgaaagatcacgttgccgaggcgcttcgagaattggaacaaattgcgtctaattaatggacaaatgctgaactcacggggttttcttcagattacatttgacaggagaccggaaaaagatgtacactaattataaacattataaagtaagaatcttttttagaagagaggtgcatgacggatggctgcacatgaattaaaagaagccttagacacgttgaaggatacgggagtccggattactcctcaacgtcatgccattctggaatatctcgtggattctatggcacatccgacagcggacgatatatataaagctttggaagggaaattccctaatatgagtgttgcgacagtgtataacaatttgcgtgtattccgggaagcggggcttgtaaaggaactgacgtacggagatgcgtccagcagatttgactttgtcacctctgaccattatcacgccatttgtgaaagctgcggaaaaatcgtagacttccattatcccgggcttgacgaagtggaacagcttgcggctcatgtcacggggtttaaggtaagccaccaccgtttggagatttacggcgtatgccaagaatgttccaaaaaagaaaaccactaaacgaagctgaccgctttgatacggtcagcttcgtttattttacactgttttttctgttataagactcatcgaacgctttgccttccaatcctttatccaatgtgagcggctctctgcaatgcatgcacatatccactctgcccagaatcttcgtttctttctcgcaagcggggcacatcacccggaccgcttttgtggacagcatgccgatccaaaaataaacggcggtgctgagtccgatcgacagcaggccgagaatcataaacaagctggcaagcaaaacagactgcttaaagaacagcccgatgtacataatgataaacccaacgaaaaccaaacttaacgcaaacgttctgatcttattaattttgcttgagtatttcgccatggccatccccctctcgtttaactatagcacaaaacagatggcatattcttcatgttttcgtaagaaaagggaagaataaatatggcacctgaaaggaaatttgttataatagtgcaatgtgtttagaaaaaaggactttcatgttttatcatagaaatgtagaaacaatagctagtgaaacaatcgcattggaggaatcgtaatggacaatcttctccgtccaatttaccaagaaagagcaagtcatcccgatacgctggccgtccttatgattgagagaaggagtaaagcatcatccatcacggataactttgatgcggtcatgcttgtcattgtcaaacaggctgatgaacctctttttataaagcattatgaattcgaacaaaaaaccgcttctttacatattgtaacggatgctctgcttcaggaatggattctgcttgggaccaatagaagagtcatagattggatcatcaacggcaaagtgctgtttgaccgcaatgaatatatatctgaactcaatgaccggctcagcacttttcctttcgccgagcggaaattaaagattggaatggaatacggcaagctgatcagaagatttgtagaaggaaaagcgttttttgaagctgatcattttctggatgcatattatgcggtagtgcatgctcttcaccacttggcccgcatagaagtgattgaccggggattttatcccgaaacgacagtctggaaccaggtccgtcacattgagccgcaggtatataagctatattccgaacttgtcgagagtcacgaaagtttggagaaaaggctcgaattattattcttagcaaatgattttctcatccattcaaaagctgaaatcggttctgcgcatctttttcaagtgatgaaagaaaaagaaatgtggcagtttggagaattgcttcagcaccctgaactggtgcacttcacccaagatctcggtgtcatgcttgattacctgacggaaaaaggctttgttgaagtatctcaaatagagaccaaagggcaggaagtatatcatcgaggatattctttcaaaaaaagtgttgacgctgaattataggcatggtatattattaaacgtcgctgatgcgcttcaacaaaaagctcacagcggcggagaaataaaaacaaaaaaacatttgacagcaactcgctgaaatgttatactgaaaaagtcgcctcgagatgaggttgaaatgatctttgaaaact

SEQ ID NO: 56 - DNA, 104953 bp, Bacillus amyloliquefaciens
ggacgccgccaagctatcttaacccagttcatgatgaactgggttttttatataaaagatcacatagatatataaagctaatgcctttgaaaggcattagcttttttgtttacattgattttgctttgctgttgtgatgttgaagattgtttgattttattgtctcgagcattcttaaactgaatacaatcagcagcataaggagcatcagtgcagtaaacagccagaacgcagtttgtgcgggatattcatctaagctccagccgacggcgatcggaaggagtgaacctcctaatccgtttgaagcgagcagaatactggtagtcgtttctgtctttccgggataaaaatgattcgtgatgattagggctattgcaaacatgcctgccatgaacagccctaaaaagaagcaaagggcaaaaccgaaccatacgtttttgcttaatgctaatacggtaagtgcagccagaccgccaatgcttatgagacggagataacggtgatatgtcagcttttctgataccgggcctgttaataaccttccgatgatcatgcccgtccaatacactgtaactgttatcgttgccaaagagttggggatatcccatttctcagcgaagatggaggggataaaatgtacaatggaaacttcactgccgccgtaaaagaagaagtaagcacccgccaaggcaataaacagcaatccgtgtgaccgataaccggtgctttctttttgagtgtcatcggaagggacctctttgcggatgagaagctgatcaatactgccgaaactcatctgcttccatgcaattaatagtgcaaaactggataaccctaatactaaaaaagcaattgtccacatgtggttgttgataagaaagcctgagagcagaggcatgaaaagcgcacctaatccgtaggccacttccatcttgctcatggccacagcctgtctttctttaatagcggtgaggatgatcgtgcctacacaggattccaccaatccggcgccaagccccgcgatgctgacgagaagaaatagcagcggccagggcggcaggaaggtgatgaacatttcacagctgatgagtgccaggccaaagataacgacgtttttgcgcccaagctttttcaccatgtaaggcattccgatgacaccaatgagaaagcccatgaactgagagaataccaatactccgccattactgtagctttgtgaataatgtgtgagtaactcaggcagtacggctcccagaataacaagtgtaaaagcaatcgatccataagaaaaacagcttatccacagcagacgagttttcatcattttatctccttattagtaaaatcatatttctctctactcgtatgacatgatgtttttacaaaaaatccaattattgttactatatcacataacttttgctcgtacatcccttatggtaacgttaacaaattgttaacattttttacaagaaagatcgttgacattattttcaataatttatacgataaaaagcgaaattctaataatttcataggggtggtatttgtgggaacgaaggaaatcacgaatccagacagcttgtattacagtgttgacgatgtagtaatggagcgcggagaagggatttacctgtacgatcaagagggaaatgagtacattgattgcgcctctgccacgtttaacttgaatttaggatacggtaacaaagaggtcattgatacggttaaagaacaagccgataagctgatccatgtaacatcatcttttcaaacagacgccgtaaataaactggcagaaaaactagtagaaatcgcccccgataatctcacaaaagtacaccctaaagtcagcagcggttccgctgcaaatgaaggagctattaaaatggctcagtattactccggaaaaaccgatgtcatctccttatttcgaagccaccttggacaaacgtatatgacttccgctttgtccggcaactcattcagaaaagaacctttcccgccacaaatttcttttggcctgcaagtccccgatccctattgcagccgctgtttctataatcagaaacctgatttatgcggtatgctgtgcgtagaaagaattaatgattttattgagtatgcgagcaatggaaaaattgccgccatgattattgaaccgatatccggaaacggtggaaatgtcgttccgcctaaagagtattttaaacatttgagaaagctttgtgatgaacatgatatcgctctgatttttgatgaaattcagaccggattcggacggacgggcaaaatgtttgccgcggaccacttcgatgtgaaacctaatatgatgacggtagcaaaagggctcgggggcacaggcttccaagtcgccgccactctgacggaggacaagtataccgggcttccggggtatacgcactccttcacgtacggctcaaatgtgatggccgccgctgccgcgtgtaaaaccatagatatcatgcagcgcccgggatttttggaaaatgtaacgacggtcggtcattatattatggatcgcttagaaacgatgaaagaggatttcgcttttatttctgaggtaagaggcgtcggtcttatgatcggtgtggagattgttaaagagaacaatgaaccggatgtggagctgaccaattatattgctaaacgggcaatggattacgggctgattctccggacatcccgttacggattcggaaatgtatttaagatccgtccgcctttaaccataacacttagtgaagccgaagtgctctgctacagacttcgtaagctattggaggaaatcaagtgagagactatatcattgggcttggacaatttgtttatcaaaaggtgaaaaatcaaaaaggcacactgaaaaaccggctcgtaaacggctattccccgggaggcgacgcccaatttaacatagacgccgctgctgaggaggcggtgctggattatattcaagaaaagggccatccggttgctttttacacggaggatggcggcctgaagctgattggagaagatccgcaatatattttaattgtagatccgatagacggaacgcgcccggccgccgcgggacttgaaatgtcgtgtatttcgattgcgcttgcttcgtataagccaaacgcaaagattaaggatatcgaatttgcttttttacttgaattgaaatcaggcgcttttatgtacggtgatatatacagcgatgccattcattttgaagggtatcatggagaattgccgaatttgagcggagtgcgggatattaaaaatatgttttggagccttgaatttaacgggcatccggcgcagctgatgacggacgcatacggccatctgattgaccagtcggccaataatggcggggtttttgttttcaacagcgcttcttattcgatttcacgaattattacggggcagatggatgggtatgtggatatcggcaatcgtctgctgaaagatgatccgaagctgctttcagattttcagcaggtcgggaacgggcaggtgctgcatttgtttccttatgatattgccgcaagcgtttttttggcgaagaaggcgggagtgatcattacggatgcatacggccggtctttggacgaaacacttctgacagatttaagttatcagaatcagcaatcatgtattgcggcatcaacgaaagagcttcatcaaacattgttagaccaaatccgctggggcagaaaggaagagaaatatgaaggcgttggtctggactcctaatgataagcttgaatatcaagaggtggacgagcctcaaattcggaaatccaatgatgtgaaagtgaaaattttcggcactggtatctgcggaacggacttaaatgtgctgaaaggaaaaatgaatgcaacccatcatatgattatggggcatgaatcggtgggagcggtcgtggaaatcggaccggacgtgacaaatgtaaaagtcggagaccgcgtcgtgatagatcctacgcagttttgtgggaaatgtcattattgccggagagggctgacgtgttattgcgaaaccttcgaggattggcagctcggaatcggagcgcacggaacgtttgcggaatattacgtgggggaagacaggttcatgtacagaattccggattcaatggaatgggagcgggccacattggttgagcctctctcctgtgtgctgaatgttgtggacaaggcttcgattcagccgcaggactcggtcttggttttgggctccggaacgatcggactgcttgtgcaaatgatggtgaaaaaactggcgcgattgacggttgcgactgaaataggcagtttccgaagcgaggcggcgagccggatatcggattatgtctaccaccctgaagcattaaccgtggatgaagtgaaacggattaatcaaggaagaaaatttgatgtgatttttgacgccatcggcaaccagcttgattgggcttatcctttcattgaaaagggaggcagaatggtgccgatgggctttgatgatacgtatgagatgacggtcaggccataccagctgctgtcaaacggcgtgacgattgtgggcacaggtgaagcccgccagatcatggaagccgcgttagcatgcgcgtccgaccttccgcagctctatgatcttattacggaaaagacggaactgaagaattatgaagaagccattgatcatctcatgggcatcgacccggtgacaaaagaaagaaaggatatcagcgcaataaaaacaattcttgtgtctgatccggaacttttataaaagcggaaacggctccagtgagagtcgttttcttttcttatttatacggtcttgcacatttctttaaagtttaatatgatactctttgttaacaattcctttcctcaacgacattatactctgagcgtgtcctctttttccccgtaagcttgcctcatattccacagatgaaaatcaatgtttccaactgatagggtgcggatttttatagtgaaaaggagtcgttatcatttgaaagattatacattacagcagcaatggttcggaaatgtccgtaaagacattctggccggtattctggttgctctcgctctgatccctgaggcgatcggattttcaattattgcaggtgtcgatccgatggtcggcctttatgcatcattttgtatcgcgattattatttctatcttcggcggcagaccgggaatgatttcagccgctacgggttcaatggcggttgtcatggtgacattggtggctgattacgggctgcagtatttgtttgcggcaaccattttgacaggtattattcaatttattcttggtgtcagtaagatagcgaaattgatgaaatttattccgcgttcggtcatgatcggatttgtgaatgctttggcgatcttgattttttctgcgcagctgccgcagttcaaaggagcttcatgggtcatgtacgccgtgcttgccggatcactggctatcatatatctattgccgaaggttacgacggctgtgccgtctccgctggtggcgattattgtcatgacgatcatagcggtggtctgccatgcggatgtccgcacggtcggtgatatgggcgggattacaagttcacttccgcatttcttgataccggatgttccgtggacgtttgagacattgcggattattttcccgtattctctggcccttgcattcgtcggattgctcgagtcattgctgacggcccagatcattgatgaaatgaccgatacggatagtgataagaacaaagaaagccgcggacaaggcatcgccaatattgtgaacggatttttcggaggcatggccggatgcgccatgatcggtcagtctgtcatcaatacgaaagccggcggacgcggccggttatcggcatttacggccggcgcgtttttaatgtttttaattgccgtattaagcggtatcgtcgtgaaaattccgatggctgcgctggtggccgtgatggttatggtgtccatcggcacgttcgactggtcatcgattaaaggtttgcggaaagcgccccttactgattcgatcgttatggttattaccgtcgtgacggtcgtcctgacaaatgacttatcaaagggtgtcttcgcgggtgtgctgctaagcgcgatcttttttacggcgaaaatttctaagctgaagattgtgtcacattccgaacagaaagatgtcagaacatataaggtaacgggacagatcttttttgcttccgtgtctgaactgatgaatgccatcgtttatgatgaaggcgtgaagcggattgtcattgatttgaccgatgcccacgtgtgggatgattcgggagcggcggctcttgagaaaattgtcgccaaatgtaaagaatacggaattgaggctgaattaaagggattaaatcagaaaagccgagatttaatgaaacaaatggcatagaatttgtgaagtccggatgaatatatccgggctttttttcggttaaatttgccggggtgcattgttataatgaatgagacttgaaaaccgtatataggagacttgcatatgatgtggcttcagaagttgaaccaagtgttggggagaatcatgccgcttttgactccgtcaagtgtggcggcgggtgtgctgttatctcagcatatcagctggatggccggcgctgtgccgtggatatttgcatttattacatttacgggcagtctgagtgccaattttcaatcgctgaagcgcagtatcgagaagccgctcccgatgatcatggcattgtttgttctgcatattttcatgcctgtttttgcatggggaagcggccatctgattttcagcggtgaccctttaactgtgacggggctgattatgggtgtggtgattccaaccggaattacgagtttgatttgggctgcgatgtataagggaaatgtcggattgacgctgtctattatcctggttgataccgtcctttctccttttatcgtaccgttaagcctgtctgtcctggccggggcgaatgttcagatggatgtgtggggaatgatgaaagggctggcggagatggtggtgattccatccatcgcagggatgatagtcaaccagttttccccgccggtaaggactcaggcgataagccggtcgctgtctcctttttcaaaaatctgtctgatgattgtcattgccattaacagttcggaaatcgcgccgtatgtcacgcacgtggatatcaaatttgcgggcatcgcaggcatggtattttttattgccatgacgggttatgccgtggcatggctgatcggaagactgatgaagcggagccaggatgaaatcgtgtctctgatttatacggggggcatgcgcaatatcagcgccggagccgttctcgccgtgtctttctttccgtctcaagtggcggttccggtcgtcatcgggatgctctttcagcaaattcttgccgctttgttcggctatttactgaaacgctttgaacttaagccggtcgtgatgaagtatgaaaaaaaccgctcagctacgtgagcggttttttccgtacagccagcttagtgctgcattgaattgtcgtttgaatgcttcttgatggtgcacggtgcctttttcaacagtgaaagagagctgagattgagaaaagcctttttgcctcaggctttcatgcacgtctttattttgtcggatcatggtgttttggatgttgtttttatgctcagcttcgcggctgccgacagacatatagatacgctgccgtgccggacgcaaagatgcggagcggacatactctgctgatttttcataccagaaggaaccggaaatacagccgattctgccgaatatttcaggcttctgtaacatcgcgtacaccgaaaacagtccgcctaatgacgcgccgatcaggcctctcgtttccggatgtgcagaaatgtgatgcatatcttcaacagtggggatgatgacatttgtcagctcctcgagaaagagcctccctttgccgccgaaatcatgaaacgcagtgctcagggaaggcgcgggccacggcgtgtactcatcgagcctgtcagccggtttgatgccgatgaaaatcaattcgggaagtgttccgttcgcaaattgggattcaagcttatccatctgttctaaaaacaaagaacccccgtccagtacgtatacacagggtaaagcccctgtttgaaccgaacaggagggaggaagatacacagtgcattcctttccgtttatccggtgttctgtaaggatgcctctcatgcatccagccccttcttttgcttaaacagaagaaaaaagaaataaggaacgccgagaatcgcaagaataattcccgccggcacttctgaaggctgaaagaacaatttgcccgcaaagtcggcggatatgacgaggagcataccgaccaatccgctgaccggtaatgagtatctgtgctcaatcccggcgagcctgcgggaaatatggggcgcgatcagtccgacaaatgccatgctgcccgctgcggttacacatgcgctgatcaaagcgatgcaggcaatgagtaaaattgttttttctttattggttgaaacaccgaggcttttcaccgtgtcctcatcgaaacgaatggtatccagcaatgacgttttcgccataagaagaggaatgaacaagatcagccacggaaggatcgccgtaatggtcatccagtttgccgaccagatgctgccgtttttccaaaccatcgccatctcataatcctgcgggtccatttttaatgaaagaaataaagacagcgcgctgaatccggaattcatggcgatcccgacgagaataattctgcccgattcaagatgcccccggtgccaggcgaaaatatagatcagcacggccgccatcaatcctccgatgaggccgaagacaggcatacccatcgcagaggcaagtgccgtcgcttcagattgtccctgaaacagaagcataaacgtgacgattccggctccggctcctgcattaatgcccaaaataccgggatcggcaagaccgtttttggtaatggcctgaataacggctccggctatccccaacccgagtccgatggcagcagccatgacaatgcgcggcagcctcagctgaaacagcaaaatgtcatattgcggattcggatggatgcggaaaagcgtactgagcagttcacccggctttgcggaaaaagaaccgcttgtcatgctgaaatagcttacgagcaatatgagagcaatcagaatgatataaattccggccattttacgcaccacgctgatcccctccttttcttttaatcaaataaagaaagaaaggaacaccgatgatagaagtgacaacttcaataggcgtctcaaacggataattgatgaatcggctggcaagatcgcaaagggtcaggaagacgccgccgatgatgcacgcgcatgggatcagcctgctgtagtccgatccgacgagaaaacgtgtgatgtgcggaacgaccaaaccgacaaaggcaatttttccggcgagtgccaccgagcttcctgtcaatatgacaacggccgccatcgccatgagtttgatggttcttttctgctgtcccagactttttgaaatgtcgtctcctaatgatacggcagtgacctttttgctgagaatcatggccgtgatgattccgattgcaaaaaacgggacggccagtttcaaaaaatcagggttcatttgatgcagtctcgcactgtaccaaaaactgagatcctgcgaaatttgaaaataaatcgaaagcgcagccgacagactgctgagaagcatactggtcaccgttccgataatggcaagctgcaccggggtaaaaccgccgggaagaatggaggccagcccgaaaacaagagcggcgccgaatgcggaaccgataaacgagtatatgatcatttcaatggatgtcgattgagggagcaataccatgcaaagggtgatgataaaagcggagccgtccgacacacccatgatcgaaggcgaggccagatagttccgtgtgattccctgcatgagcgctccggaaacagcaagggcggcgccgataaacatagcgccggcagccctcgggattcttgaatgccatatgatctgatggtcggtattctccggattaaagtgcagcaatgcggagaacacggtatggaagtcaagctgctttgcgccgtataaaacggaaagcagcagtgacagaacaatggcaatcggtgaagcaatgataataatgtgtgtccgccgttttgcatacatgtgaaaaacctactctttattagtcttgagtcaatttgtcagccgcaacctgtaagaagcggattttactccatgcggttccgccttgggctaatggatcaatcgtattgacgtatacatggtcttttttgactgccttcaggctcttccagatcggatttttctctaagtctttcaaagcgtccggcttatctgcgttttcgtcatcagagaattgtacaaagatgtggtcagggttcatttcgcttaatttttcaagagaaatcagttcctgcgctttcgccgctttgacttcgtccggcgccttcaggcctaaatcaccgtaaagcgtggagttgaaatatacttgttcaggataaatataaatattgccttgtctgattctgatgaccagcgcgtttgactgtttcgctttgctgttgatctttgtttttgtctttttcagatcctgttcgtaatctgcgatgatttttttcgcttttttctctttatctgtaagctgggcgagcagcatcatgttttctttccagtttgatgagatatgagagacagggatcgtttcagcggtgccgctcaattttttcaacgttttttccgggaatttggttgatgccagaatgacgtctggctgcagctcaagaattttttccatattcggctgcattttttctcccgttgatacggatttatctgtaatatctttaaacagttccgggaatttgccggagaaagaaattgctcctgccggatgaacgtcaagcaatttggcgtcttccattgattctacgctgcctgtaatggcgattttgtcagtcggcgctttgacttcatatgtttttccgagatattcgattttctttttatctgaagaagcgtcctttcctttacttgctgtatcggatgtttctgagcttccgcaagccgcggccgtgaaagccaaaagcaaaatcatgaaagcgaatgccaatttcttcatctattgttcctcctgttcaattgataactattatcaattggaattatagagaaggaacagggataagaccatggataatttccggtattaccatggacgatcttcggataaaatggaaatgctttgctcgatcatccgctgatgtccgcttggagaatattcaatccacgggtcagatgatatgggaaacacgcgtttattgctgacggctctaaggttctgccatgtcccggtctgctgaatccgctgaaaataacgaagcgtttccggttctttacaagtgaaaagcatgatgcagtcagcctggcaatccgccagcatttccaaggaaatcttttcgtcaggagcaaaagtttccggttttgcggaggcaaagcctaaatcaccgaagaagacatcctcaatactgttgttatgggcgatgtacatattttctttatatacacggataaataagaaccgctgatgccgcacgtgtttaagagcatctttcgctgaatgggcgagactttgataagctttaagccagtgccgcgcttcctgctcttcattcaaatatgcggctgtgcgaagaaactggtctctccaattctcttgagccggaaggtaaaaaacttcagtgatgtcattcaggcgctgtttttcttcttcactgacagaatcaagactgaaaatgatgtccggggcagcttgggaaagcgtgtgcaagttctcttcccaatttgcattatagcggtaagcactcaggtgaaccggaatatcagaagagaattgtttgtaataataggccgtccatttcgggtgcagcgctgcagcgtaaggcacgtgatgcagaggaatcagatgccccatcgtttcttttccgtaagcggccatttttgtgcgcctttttttcatatagcttgtaggtgagctgccggtatgttttttaaagatgcggctgaaataaaattcgtcctggtagccgatttgatgagcgatttcccgcagtttgcagtttgccttggccatcagttttttcgcattggttatgcggatgtctgtgatatattcagttacgctctgcccgtatagttttttaaaggtttcactataatgcttgggactgattcccgccatatgagcgagctgggtgagcgtgatttttgtgtcggactgagcatgtatgaattgttttgtctgttcgatcgccgctttcgtattattttgatggcatacttttgcggcataaaggtcgtacatcagctgctgaaagtcggctgtatatttcattttctgcaatgcatccgccgatcgcacgttttcagaaagtgactgaagccggcttgtcaaatgatccaccgtttgtaaattcatttgctgaagtccgtggaagatgtcttccccattatccggaagcatcgcttcatcatctgatgaataggagaaaacacggagtctgacgatatacaaatggatgccgcctgacgatataggggcaatattgaatgtctcatcacaaggacagatgtagagcgtttccttctgcagcggaaagctgtctgttccgatatcaatttgtccctcgcctttcacatgaaagatcaatacgggggaatcagtgagctgatgctctgacagaaggtcggctgttttttttacggagatgatatcaatgggctgaaagaataatgtgtttttcatgagaaaccaccttttaggaaacattcatttaaatgataactgttatcatttaaattgtaccaaataaatgaatgttttcctataaaaagcggaaatgtgaaatgcgtcaaaatgttacacgtgtaacacgaatgttgtcagtatatgaggtattgttttcttagagttttgaattggttcagccggcgttgatatgtgctggtgatgtcttcaatggaagcgcctttttctatttttttgcgtacccagccgttaccgatcagcttgtcaaaagagcctgtcggcaagaaggaaaagtcatttggatataagtcatgcatggttttcagaatggaaagccctgtttttgccgcttcaaatgtgtttctgtttgttacgtagacttgaacgccgtggcacagcttgccctggtgcttggagaagctggggataaatgatgcggctctgaaggcgacgcccggaagcttgagactgttcaggcgttcttcgagcttggtgcttttcatataaggcgcgccgataagttcaaacggctttgtcgtgccccttccttcggatacgtttgtgccttcgattagtcctgtcgccgaatatgcgaatatgctgtccggggtcgggatattaggcgaagggaggacgaacggcagaccggtatcttcaatcgtcatcgtccgcttccagcgcttcatttttacgacggtgaggtcggcgccaatatgaaactctttattgaataaaagagcaagctcaccgatcgtcatgccgtgcttcagcgggatcggatacagtccgacaaatgaagcgtaatccggttcaagaaccgggccgtccggatttcgtccgccttgcggattcggccggtctaagacataaaaaggaatgcctttttctttggccgcttccatggcataggccattgtataaatgtaggtgtagtatcgtgttccgacatcctgaatatcgaaaatcagcacatctgtatctttcagcatgtcaggcgtcggtttcctcgtttccccgtacaggctgtagacgggaagccctgttttttcgtctatataggatgtgactttgtctccggcctgggcatcgccgcggacaccgtgctccggtccgaataatgccgttaaatggatgtctggtgcctcatacagcacgtcaacgctgcttttcaatgaattgttcacaccggtcgggttggtgatcagcccgaccctttttcccttcagttcctgtttataatctttcagcaggcggtcgatgcctgtttggatgcttggtttcttggcggtatgaaggtttctgtcagaagccgccgagactgccgtcatagcactgatgacgactaatccggcaagaagcgcagccgtttgtgttttcatgatctgtcctcctgtttaaagcggttttccggtcttcagattgataccgaaaccataaggatagagtgtcgttcccggatgagtgacggaaggaatgtcagcgggcagcctgccttgcggttttgtctgtccgaatatcgcttcaacgcctgccggaatgtttggctggagaaattgtccgtctgtatatcctttaaagccgtagactgcgataagggcttcagcttcttcaaagttcgcggcgtcgtaaggattacgcaggctcatcagcacaaagggttttttgttcgattgtgcggctttcatgacggcccgcggaaatgcagtcgtccacttgccgggatctgtgacggaatcgtcaatgacaccgtcgtttacgacaggatcatttttcacgacatatgagcctgtaatcacgtaatccgcgtcggataccagctttttgtgctcatcatgaaatgtgcgctcggcgaagttcattttactgatggttaccggccggatttttttcttcttgatgagctgccgaatggtttgttccattgacgctgtttgatcttcataaggagcggcaatgagaacgcagctgttctttttcggtttgaatgggagcgtgcggtttttgttttgtatgacggtgacggatctttccgcgatttgtttttcagctttcaggtgatttttgctgccgacggttttctttgcttttgcaatcttctttttcagatttgtctctttcggtgcgggatatatccctcgttttattttcagggaaatgatgcgttccgctgatttgttaatttgctgcagcggaatttcccctttttgtaccgccttttttaaagcggaatgaacccgggcaaagcggttttccgtttgcagcgatgtcacttgggccggcataagggcaatatcgactcctgcttttattgccatgacgaccgcctcttcctggccgaaatgatcggcaatggctttcatatttaatgcatccgtaacgatgacgccgttaaatctcatttcctcacggagaaggtgagtcatcacttttttcgagagtgtggcgggtacgagaatgtctgaaccgtccagcttgcttttataggttgtatcgtcaaaagcgggaaattgcacatgggctgtcatgatcatatcagctccggcctgaatggccttccggaacggataaagttcaatctgacgcagtctttcttgattgtgggtgacaagcggaaggccgtagtggctgtcgacatccgtgtcaccgtgtcccgggaaatgtttgacggcggcagcgacatcctgcttttgctgagccttcattgaggcaaggccgagtgaagctgtcagatcacggtctgaactgaacgacctgacgccgatgacagggtttccgggattattattgatatcgagaacgggagcgaaattcgtattaatgcccagtgctttcagttctttgccgataatggcgccggtctgggacgcgtaggctgtttttctcgcggctccgagcgccatattgcctgggaaatgagtgccctcaccaagtctggttacgatgccgccctcctgatcaatgcttaataatagcggaatgtcagggctcgccttttgaaaggcatttgtcaggcgaaccgtttgctcagtgttttttacattttctgcaaataagataacgccgccgaaccggtacttttgaataagccctgcgacttcgtcattcatttgggtaagagcctcaggtgatgactgcccctttttttgccaatttcgaaaatcaggcatgagcatctgccctaatttttcatctaatgtcatacgggataccgcttgttccgcctgtgacggaatgtccggttttgtcgatgcatgatgcgtgccgaaaacaatgaacaacagtaatacagctgagatgacaagtttcatgatggtgccctcctgccgtcatagtttggaccaaagacatgggttgtcattcaatggcttcataaatcgtttttatgacgctgccgtagcttccggtggggaaaagatccccttcaaaaacattcgggttttcaccgggactgacgacgggggaatgctttttattggtcaaaagtgcgatccccagcttataagcgggatcaataatcgtgatggtgccggtccatcctgtatggccatatgcctgcctgcttgcataagggccgaacatccactccatatccgggctgccgtttttccgccagccgagagcgaaagtcggatcagaggatgccgccgttgtgaacaaatcggccgttcttttattgaagagagaaacgtgtttataactgcctccgttcagcatgacttgaagaaggacggctatgtcatcagctctggaaaacagcccggcgtgaccggacacccctcccatggagtaaaatgctttttcatcgtgaacttccccctgcagcgtatacgtcctgatgtgagggaaatggatgactccgtcacgtgtgttgcctaaacgttcagtagctgcgaatgctttttctttaaagcctttttgcagcggattgaacagtgtgtgcgtcagtttcagcggtttgtacagttcttgttccgcataggcatcaagggtttttccggttatgctttcaatgatgcagccgagaagcatgtaaccgatatcgctgtatacgtgttttgttcccggtttgtattcaagcgggatttgggtgagaaaacggatcgttttctcacgttcttgtgaatacaaagggcctgcggtgtccggctgatagaaataaaagcttgccggcagaccggattgatgctggagcacatcgatgacgcgaatgcggtctttttcttgaatcggatcgctttttccgtctttgaaatcaggaaggtaagccgagactttttgatacacatcaagctttccctggctgacgagtcgctgtagtgcaaaattggccgcgtacatttttgtattggaagctaaatcaaacatggttgatgttttcatttttttcggacgggataaaagggtagtcccgtcatattttttgctgtagccgtatgctttctttttgatcacccgtccgtcctttacgacgacgaggacggctccggggaatcctgctgcgatgtctttttcaatcatttgatcaacctttctgagctttgctgtgtcgtataatttggattgggcttcggctttgtgctgcggcaggaaggagaggctgatgaccattgtgagtatggcggctgtcagtgttttcatattctgatccctcccggtttattcaaattcagcagccatatcatccttaaatccgaacgcataagtgaagacaaagcccgccccgtaagagatgaagagaccgatgatatacaaaacgatttgagccggctgtacgagaaacgagagcggaaggccggagacaccgattgaaaaagtagccacctgaaaatgggcttgaaaggcgccgccgattcccgcccctaaacacgccgtcaaaaacggccggccgagcgggagcgtgacgccgaagatgagcggctctccgattccgagcagaccggatggaagtccgccgccgatcgctcttttcaatgaggcttttttggttttcataaaaatggcgaaggccgcccctacttgacccgcgcctcccatcgcgagaatcggaagaagcgggtcatctccgattgatcggattaattccaaatgtacgggagtcaagccctgatgcaggccggtgacgacaagcggcaggaaggcggctcccagcacaaaccctgagagcactcccccgacattcagcagcgacaataaaccagatgtaatcagatcagaaataaaaccgcctgcagggataaaaacgacatatgttaccagcccggtgataagtaaagacaatgtaggcgtgacgataatgtcgatggattgatggacgtactttctgataaaccgttcggtataagcgataaaaaccgcagcgaaaagaacgccgattaatcctcccctgccagggagcagattctctccgaacaaactgatattggcgatttcagggttaaggatcaatatacccgcaaggccgcccatcgcgggagtcccgccgaattccttcgccgcattgatgccgacaaggacgccgaggtatgcgaataagcctgaaccgataaccgttaaaataagtgcgatttgggattctttcgggagccagccggcctgaatgacgactttcgtaataccggtaattaaacctgatgcaatgagtgcgggaataaggggaatgaagatgcttgatatttttctcagaaacagtttgatgggtgtggtgttttttctgttgagatcggctttttttcgtgaggcggcttcttttaaatcaatgttttttccggatgacataagttttgcgaaagcgtcggcgacatgattgacgacacccgtgccaaggatgatctgcagtgtttcggcttcgacgacgcctatgaccccgtcaagctgtttcagcgcttcaatatccgttttgtcctgatctaaaggcgtaatcctcaggcgtgtcatacagtgggtaaagcctgaaatattcgatgaaccgccgcaattgtccaggatatctttggccagtgactgataaaatgcctctttgctcatggagatcctcctttttccgtacgatttttcccggggagctgtgcctgaaacgcgtcctaaaagcgcctgcgccgatcatgaaaacggcgcgggctcgtaaaagcacattatgtttcaccaaagaacgatcagcgttctttttcttttgaaaggtgctgttcaatggctttatcaatgaagccgtctgattctttgagcagtgccttcgcgtgtgtttcgtccgaattcgtcttcagcatgacgattgccgttttgacatggctgcctgcggcctcaagcgtttcttttgccttgtcgtacggaacgcccgtgatgctttggataatgccgattgcgcgttctttcaatttttcgttgctgacatgaacgtccaccattaaattttcgtacactttgccgcttttgatcatcacggccgtggaaatcatgttcagaatcattttatgtgccgtcgccgctttcattcgtgttgaccctgtaatcacttcggggccgacgacgacttcaatgctgtgatcggcataagtgctgatcaatgagtccttattgcatgtgagtgcgacggttttggcgccgattgtttttgcgtatttcagcgcaccggccgcatacggcgtgcgcccgcttgccgcgatggcgatcacggtgtcttctgcggtaagcccgattgttttgagatcgagagcgccggtttcctcgctgtcttctataccttcagccgcttgcaaaaaggcgtctgctcctccggccatcagaccgatgacggagtcgggacttacgctgtatgtaggcgggcattcaaccgcatccagtacaccgagtctgccgcttgtgcccgctcccgcataaatcagcctgccgtttcgccgtaaggactgatgggcgaattgaacggcaatctgaatatcgggcagcacctgctgaacggcttcagccactttgaaatcctcttggttaatgatgcggagaatttccatcgtgtctgcttgatggattgaagcggtctgcggatttctggtttctgtggtcaatctgtgaatgttaagccggtctgtcatgattgtaccctcccaagtcgttaatacttgaagtatatgggcttctgaatatatgtttcaagaaaaatcggcaggaatgagataagtaatcaagcgctttcacaaaaaatgatgcagaatgtgctgttcgccgatggggccgatcgtgcgacggcctttatcaataaaaccggaagaccggtacaggttctttgcacgatgattgcgatggtttacagcaagcacgatttcatcacaccaaggaaagtaatttgcgacaaaagcggggagctgcagcatcgcttgtttggcataaccttttccctgatgcggcgcatgtaaggacagcgcactcagcaaaatggcagacacattgttcgaatacggggcaatggtttcttttgaggtatgtaaaatgaaaaaaccgacggggcggtcttcttttaaaatgactgtcgggtagcgatcccggatgacgagagcatgcggcaggacatctatcggcagagctgtgaactttttatcttcttcactcagcacaaacccgttcagcccgtctgcatgctccggtttataaaaggacagggccacatccatgatatctactctccttttttataattgatccaattcgtcttctgatagaacacggcagcctgcccgttttaaaagagcggaagtgatgccgtctccgattattttttttcctgagaaagtgccgtcatagataaagctgctgccgcaggacggactgttttctttaaggatgaccgttgcggcgcctatttcttttgcgtatgctaacgttttttccgcgccgtccatatataaagccgtaacgtcttcgcctgatgccgttacgattcttgctgttccgttcagcacgtcttcgcccgtaccgccgatgatttccgccggttcgcggggagtggtgaagccgcccaaaagttcggggcagaccataacagctttcttttcttctacgagtctgcggattttttccgaagcggcgtgagagccgttatacctgcattcgataccgccgagacaagagctgactaagatcatctgtgtccattcccttcaatattttgatactttcatcataaatgaaataagagaggagggatgagtttttcagttaaaaaacgagtaaaaaagtttgaaaataaaaaaaataatttttctctttacaaatggggtacaacctgtatataataacttttgtcagctcgacgcggacacaacggcccgttggtcaagcggttaagacaccgccctttcacggcggtaacacgggttcgaatcccgtacgggtcatatggaggattagctcagctgggagagcatctgccttacaagcagagggtcggcggttcgagcccgtcatcctccaccatatttgccggcctagctcaattggtagagcaactgacttgtaatcagtaggttgggggttcaagtcctctggccggcactgttttacaaaaaaatacggaggggtagcgaagtggctaaacgcggcggactgtaaatccgctccctcagggttcggcagttcgaatctgcccccctccaccatttttgggctatagccaagcggtaaggcaacggactttgactccgtcatgcgttggttcgaatccagctagcccagtctcagacaccttttgcataaaggtgtcttttttttatcagcattttgcttcaatttctgattgttcatcagatatactatttttaagctgctgttaaggcagtatattctgtatttttcatctacaccctgcctgaaatttggtaaaataaatgtaataaaaaaatgaaaccttttaaaacaaacaacgtatagatacagaccggtgaagggcagaggtaagataaaacatggaaaacctgattaaaaaaagaatcaagcaagtcaaaaaaggcgatcaaaatgcgtttgcagaaatcgttgacctttataaagataagatttaccagctttgctaccgcatgctcggcaatgttcacgaggcggaagatattgcgcaggaagcttttatcagagcgtatgtcaatatcgacagtttcgatatcaacagaaagttctcaacgtggctttacagaattgcgaccaacctgaccattgaccgaatccgcaagaaaaagcctgattactatctggacgcagaagtagcgggagcagaagggctgacgatgtattcgcagatcgccgcggacggggttctccctgaagacgccgtattgtcattggagctgtcggacacaattcagaaaaagattttaaagctgcctgacaagtacagaacggttattgtattaaagtatattgacgaactctctttaattgaaatcggggagattctgaatatccctgtcggcaccgtcaagacaaggatacacagaggcagagaggctcttagaaaacaattgagggatctttaagtggggtgatgaaatgagctgtcctgaacagattgtgcagcttatgcataagcatcttgatggagatatccttcctgaagatgaaaacgtattaaaacaacatttgcagtcatgcgggaattgcaaacggcattttcatgaaatggagaaatccgtagcactcgtccgaagcacatcgcatgtcacggcccctgctgattttactgccaaagttatggcgaatcttccaaaagagaaaaaacgcgcttctgtaaaacgatggatcaaaactcatccgatgattgcagccgcagcggtttttgtgattttaatgggcggcggttttttcaacagctggcataatgaccacaatttcagtgtgtccaaacagccgaaccttgtcgtgcagaatcacacggtcaccgtccctgaaggcgagactgtaaagggcgatgtcacagtaaaaaacggcaagctgttcattgaaggaaaagtcgacggcaatgtgaccgtcgtcaacggagaaaaatacatggcctcagccggacaagtcaccgggcagattgaagagattaaccaattgtttgactgggtctggtacgaactgaaatcggcgggccagggcgtcgtgagcgctttggacccgaatgaagatgagtaaagcgtataatcgctttactcttttttttgtgcatcgccgcgctggctcatttcacttgagaaatcaaaatgtggtataatgagcacgctatatgatgtacatattgctcatgcagcacaattcataacagaaaaacgaaatgactgaattcttggaggacgaggaaatggcttttgaggacatcccatttttgcaatacctcggcaatgccgttgatattctccttgtttggtatgtgatatataaattaatcatggtcatacgcgggacgaaggcggttcagcttttaaaaggaatcgtcgtcatcgtattggtccggatggccagttcatatttgggactcagcacgcttcagtggctgatggaccaagcgataacatggggatttttagcgatcatcattatattccagcctgagctgagacgggcgcttgaacagctcggacggggccggttcttttccaggagcggaacccccgtggaggaagcgcagcataagacaattgaagcgattacaaaatcgatcagctacatggcaaaacgccgcatcggcgcactcatcgcgattgagcgcgatacgggaatgggtgattatattgagacgggcatcccgcttaatgcgcaggtcagctcggagcttttgattaatatcttcatcccgaatacaccgctgcatgatggagcggtcattatgaaaaataacgagattgcggcggctgcctgttatctgccgctttctgaaagcccgtttatttcaaaggagctggggacgcgtcacagagcggctgtcggcatcagtgaagtgacggacagcttaaccattattgtatctgaagagacgggcgccatcagtgtggccaaaaacggagaccttcacagagaattgacggaagaagcactgaaagaaatgcttgaagccgagtttaagaagaacgccagagatacttcttctaaccgctggtactggaggggcaagaaaaatggataaattcttaaacaaccgctgggctgtaaagatcattgcattgctctttgcgctgctgctttacgttgcggttaacaacaaccaggcgccgactccgaaaaagccgggggaatccttttttccgacatcaacgactgacgaggctacgcttactgatattcctgtaaaagcatactatgatgaagcgaactatgttgtcaccggcgtgccccagaccgtaaatgtcacgattaaaggctcgacaagcgcggtgaaaaaggcgagacagacgaagaattttgagatatacgccgatatgaataagctgaagaccgggactcataaggtcgaattgaaggcgaaaaacgtatcggacggactgacggtctccattaacccgtcagtcacgacggttacgattcaggaaaaaacggctgagagttttcccgtggaagttgaatactacaataaaagcaaaatgaaaaagggatacacccctcagcagccgattatcagcccgaaaaacgtgcagattacaggttcgaaaaatgtgattgataacatttcacttgtcaaagcatccgtgaaccttgaaaatgcaaatgagaccattgaaaaggaagtgaaagtgaccgtctatgacaaagacggcaacgcacttcctgttgatgttgaaccgtcagtcattaaagtgacggttcccgtagccagtccgagcaaaaagcttcctttcaaaatcgaaaggaagggaagtcttccggacggggtgagcgttgcgagcattgactcgaatccgagtgaggtgacggtttacggcccgcaggatgtgctggattcacttgaatttattgacggcgtatctcttgatttaggcaaaattgataaagataccgatatcaatgccgatatcccgcttcctaagggtgtcactaaggtatcaccggaaaaaatcacgcttcatgttaaagtggacagtgaagacaaaaaggattttgacaatgtcggaatcaagacggtcggactgggaggctcacagcagattgagtttctcgatcttgaatcgcaggcgataaatattacggccaaaggctctcccgccaacattaaggcgctgaaaaagtcggacattgaactgtatgccaatgtctcggacttggatgacggagagcactctgtaaagcttgaagtaaacggcccgcaaaacgtcacatggtccctgtcaaaagacacggttaagattaagctgacttctaagaaaaacacaagttcaaataaaaataacggcggttccgctgattccggcaataagaacggcacaagcggagacgcagacaaagacaagaacaagaaccgggaagacgacactgacagcgatcagaataaaagtcaaaaccaggatcaaaatcaagaccaggatgaagacggatcaagcgctgattcttcttcaacagaatgaaaaaggagcgatacaaaatgggcaagtattttggaacagatggtgtaagaggtgttgccaacagcgagcttacgccagagctggcctttaaagttgggcgttttggcggttatgtcctgaccaaagataagcagcgcccgaaagtgctgatcggccgtgatacacgtatctccggacatatgctggagggagcccttgtcgccggacttttatcgatcggagctgaagtgatgcgcctcggcgttatttctacgccgggggtatcctatttaacgaaagccatggatgctgaggcgggcgtcatgatctccgcttctcacaaccccgtacaggataacggaattaaatttttcggaggggacggctttaagctttctgatgagcaggaggccgagattgaacgtctcatggatgaaccggaagataagctgccgagaccgacaggcgcggacctcgggcttgtaaacgattattttgaaggcgttcaaaagtatctgcaatttttaaagcagacggcggacgaagatttcacaggcattcatgtagcgcttgactgcgcccatggtgcgacctcttctattgcgacgcacctttttgccgatctcgatgctgacgtatctacaatggggacgtctccgaacggattgaacattaatgatggcgtcggttctacacacccggaagcgctgagtgctttcgtcaaagaaaaaaacgccgatatcggccttgcgtttgacggcgacggcgaccgcctcattgccgttgatgaaaaaggaaacatcgtcgacggtgatcagattatgtacatatgcgcgaagtatttgaaatcagaaggccgtctgaaggatgataccgtcgtatcgaccgtgatgagcaacctcggtttctacaaagcgcttgaaaaagaagaaatcaaaagcgttcaaacggcagtcggcgaccgctatgtcgtagaagcgatgaaaaaagacggctataatgtcggcggcgagcagtcggggcaccttattttccttgattacaacactaccggcgacggtcttttgtccgcgatcatgcttgtgaatacgctgaaggcgtccggcaaaaccctttcagaacttgcggatgaaatgaaaaaattcccgcaactcttagtgaatgtgaaagtgacggataaatataaggtagaagaaaacgctaaggtgaaggccgttatttctgaagtggaaaaagaaatgaacggagacggccggattttagtgcgcccgtcaggcaccgaaccgctcgtccgcgtgatggccgaagcgagaacaaaagagctttgtgacgaatatgtcacaaaaatcgtggatgtcgtgcggacagaaatgggagcggagtagcgaagtttataaacagagagcgaacaagacaagtgcgatcagcataatatgatagtaaacatgatgccggggcggcaaaaaataattgaccgtccttggcacatgctgtaaaatcaagcttgttcagcctttgtttttcacttgcaggaaaggcgggattgtttgcatcttttataattacagcgcccgaactaagcgcccgaaaaacggcttagttgacgaggatggaggttatcgaattttcggcggatgcctcccggctgattcatttagatcacagccgtaaggatttcttcaaaccggaggggcgactctccgaacaaagagaaatcacatgatcttccaaaaaaacatgtgggaggggacgattgaaagtccccttgtaatttgactttcttcgtctccttttgcacctttaggaggaagaaaatatgtgtggaattgtaggttatatcggtcagcttgatgcgaaagagattttgttaaaaggattagagaagcttgagtaccgcggttatgactctgccggtattgctgtggcgaatgagcagggcgtgcatgtgtacaaagaaaaaggccgcatcgccgaccttcgtgaagtggtggatcacacggttgaatctcaagcgggaatcggccatacacgctgggcgactcacggcgaaccaagcttcctgaacgctcacccgcatcaaagcgcactcggccgctttacacttgttcataacggtgtgatcgagaactatgttcagctgaagcgcgaataccttgaaaacgttgaactgaaaagcgacacggacactgaagtagtcgttcaaatgatcgagcaatttgtggcgggaggacttagcacagaagaagcgttccgcaaaacactgactctgttaaaaggttcttacgcaattgcattatttgacggtgaaaacacagacaccatttacgttgcaaaaaacaaaagccctctgttaatcggtcttggagatacgtttaacgtcgtggcatctgacgcgatggctatgcttcaagtaacgaatgaatacgttgagcttttggacaaagaaatggtgatcgtgacaaaagacgaagccgtgattaaaaaccttgacggtgaagtcatgacacgtgcgtcttatattgctgagcttgacgccagtgatatcgaaaaaggcacataccctcactacatgttaaaagaaacggatgagcagccgcttgttatgcgcaaaatcatccaaacgtatcaggacgaaaacggcagactggccgtggccggcgatgtcgctgacgccgtggcggaagcggaccgcatttatatcgtggcttgcggaacgagctaccatgccggtcttgtcgggaaacaatatattgaaatgtgggcaaacgtaccggttgaagtgcatgtagcgagtgaattctcttacaacatgccgcttctgtctaagaagccgctctttatcttcctttctcaaagcggagaaacagcggacagccgcgccgtgcttgttcaagtcaaagcgctgggtcacaaagcgctgacaattacaaacgttccgggatcaacgctttctcgtgaagcggattacacattgcttctgcacgcaggccctgagatcgctgttgcatcaacaaaagcgtatacggctcagattgccgtcctcgcgatcgttgcgtccgttgcagcagaatgcaacggcgttgatatcggttttgatttggtcaaagaattaggtattgcggcaaacgccatggaagccctctgcgaccagaaggacgaaatggaaatgatcgcacgtgagtacctgactgtttcaagaaacgctttcttcatcggccgcggccttgactacttcgtgtgtgtcgaaggtgccctgaagctgaaagagatttcttacatccaggcggaaggcttcgccggcggcgagctgaagcatggaacaatcgctctgattgaagaaggaacaccggtctttgcgcttgcgacacaagaacacgtcaacctgagcatccgcggaaacgtgaaggaagtcgcggcccgcggcgccaacacttgcatcatctcgctgaaaggcttagaagacgcagacgacagattcatcctgccggaagtcaaccctgcgcttgctccgctggtttctgttgtgccattgcagctgatcgcttactatgcggcactgcaccgcggctgtgacgttgacaaaccgcgcaaccttgcgaagagtgttacggtggaataatatatttaacccctttggttattagccagaggggttttttaatgcggaaatgagaaatacatactctttgcgattgtaaagaaatccccttttatatattgaaaaggattaacacctgctttataatacgagatgcattccggttaaaacctcatcggaaagtaatcacctccagcaattttcatcatgaatatccattatataaatgtaatcaatcgattacacatccacattatgcttatgactttaaaatccctgttgtatttgccggctcctgcctctttatgaatacctcgactagatataaaaatcacaacatttttgcaataatccggttcaattctcaaaaaaagtcctgacagcaatgataggagtggaatgatgtcaaaccttttagaaatcagaaacatcagcaaatcttttggtcataaagctgttttaaaggatgttacattcaatgtgcctgccggatcaattgtcggttttatcggtgataacggcgcaggcaagtcaacaacatttaaaacgatattaggattaatctctcaggatagaggtaaagtgaaaatctttggtaaagagaatttggataaacatataaagttcaaagaagatattggggtcgtatttgatgcgatgaatcttcctgcgcaccttacgataaagcagctgaatcatgtatttaagaaactattcggtgcttgggaccaagatcatttttaccggttggttcattctttctctttacctatggacaaaaaagtgaatacattctcgcgcggcatgtcaatgaagttatccgtagctgttgctttgtcgcataatgcaaaattattacttctggatgaagcaacgggaggacttgatccctcttcaagagatgacctgttaaatgaattaaaaagctttgtgagtaaaagcaacggcggtattttactttcatcgcacattatgactgatgtcgagaagatagccagccatatcattattatgaaagatggcgaaattttattaaatgaagagaaagataaggttcttgaaagctatactgttatagacgttgatgagggccgattggctgagcttgacgaagatatcgttctagcaaaaaggaatcatggatcttattggagtgtgcttgtatcggatcaacagaaattgccgaatggcgtaacggccaacaccctttccatagaagaaatcagcgtctttttaacgaggagtgaaaacattgagaggtctgttactgactaactattacttggtttatcggagtttctttgcatacacggggttggccatattggtatcagcagtcattttttattttggggatgcttcaatgcatcgttttgttgcaatgctgattattttgtttgtcgttatgcccgcccttgaggttataaagtatgagagcaagtctggctatgacaggtatgtcctgactttaccggtcagcagaacaaatattgttcaaagtcactatgtcttttatcttttggttgttgtgatcggagctgtaatatcttatggtattttccttgtatacagcctgggttctgatgaaccaattgacggcatatttaatattgtctcttttggaacgttcatcgttctctttgccggtgcaatcgtttatcctcttctctacatgataggcccggaaaagtctgatgctatcgtgattggaggggcaatggggggactttttgctacctttggattacaaagtgtcgttgggtatgtagcagaacaagtacctctgtcatttttgcatataaatccttctttatatgttccgattatatatctcttgatcggcgttatcttatatatcatttcatttttcattgccgcagctatatatcataaaaaagaattttagcagcgtgtttaatgattttatgctgtgacaacaggataaggcatggcatgggctctcattaattcactttaactccaagcagacagccgcccgcacaataggcggctgttcttctaattaaaactgcgttgtcacatcgtactcataatcaatctttaatttcacatttttcatagtcgattttgctgtttgcgagtgctcggtgccacactttattctcttctgacattatgcaatgtcttgtgtttccttggcttggtgtttgagtcgcggcggtattgattcttttcactttggcgtcttttggaatgcttgtttgtttggttaagtcgagcctgagaacggttgaatctgatccattcggactgaggcttgtatttataattgggaagactttactgagagagcagtgcattattataatggattcggggaacatggtgaaatgctttcaaagggttatttatcaggaaatacggcattaattaataatatatttaaaaaacagaagaacattcattaccttataaaggaatgtaacatttaacacaggagggaattgattttctcttccttcctgttttatttttaaataatccttgagagcatggtgagctatttttataagaaggtgagaaattggataatatatataaattgctgattatagaagacgataaggatatggctaaggcgttacaaaatttacttgttaaatggaattttgaaactgttatatgcggagattttgataatattttgtcaatatatgaaaaagaagagcctcacatcatattattggacatcaatattccttcatttgatggtttttattggtgtaagaaaataagagaagtttcaagtgtcccaattattttttgctcgtctagaaacagtaatatggatattgtcatggctattaacaatggcggggatgattatattcaaaaaccatttgacagccatgtattggtggcgaaattacaagcaattataaggagaacttatgagtacataacagcagaatctcatctaatcgaatctaataatgtgatattaaaccttaacgatgcaaaaatatacttccaagatcagagtttagagcttacaaagaatgaatttaaaattctaaaaacgttaatggaaaacaaagggaaagttgtttcgcgggataatttaatgagacagctttggaatgatgatatttacgtaaacgaaaatacgttgacagtaaatataaatagattaaggaatagattagaggggattaatgttgatgactttattttaacaaaaaaaggaatgggatatataattcaatgaaattaattgattatgtgaaaaatcatatattatggattttatgcagtgcacttattctggttgtaatcaatgggattttgtttgcgagtacctctattcatcaaagttatatagacattttttatatggatttgttgattgtctttattctactgatcaacattttctatggattcatcaaggcaaaaaagaaatacgaagttgtgtttaatagttctatcgaaactttagaaaaaaacaaagttagaaatgattattttatagatatgcttataaaagtctccaaaaagcaacaaaataaatttttgaaagcagaagaagattataaaaacggtattaacgaaattcaggactatactactcaatgggttcatgacataaaagttaatatagctgtgtgtgaactgctactggatgagattaactcagaaagcagcagagagctgcgtaatcaaattgaacgaattaaatttaggattaatcacattttacatgtgacaagagctaatcactacgatcaagacattttagcgggagtagtagatgtatgtcatattttaagaagtgcaataaaagaaaatgctcttttttttattaataaaaacattgagattgagactaatttaaaaccatttagtgttatcagtgatgaacgttggatctattatatttttggtcaaattcttaataatagcagtaaatatacacctgaggggggaacgctgactattacaactaaagaagagaaacaagcctattatataatgattaaagataatggaattggtatttcaaaagagggtttatctaggatattcgataaaggctttacaggtaaaaatggtaaggtaggaacgaaatctacagggatgggtttatattatgctaaaaaaatggctgatagactaagtataggaattgaggtagacagcgtagagggtgaatatactgaatttcacattatattttataaactatccgattattataaagtggcaaatgaagcaataagtaattagttaaaaacaggggataatctaatgagaagaaaggctaaaatattttgtattccatttgcagtgggtcatcgatagtttattctaagtggaaaaaattcatggatccacttgttgaggtaaatgaagtagagttggctggcagaggaagaagattgaaagaccctcaatagacaatatggaagaaatggttgaggatatatataattctattaagaataatataactgaaccttttgcctattttcgaacatagtatgggtgaactgcttacatatgagctttgtcacaaatttcgaaatgaaatcctgccctcgtgcctatttgtctccgtagaaaagctcctcaattgaagggaagaaaacaactaatacacagcttgccaaaaaatgattttaaaattagatggtacagataatttatttttaagaaacaaggagttagaagatattttcttgccgattttgagaactgagttaagtcaatagaaacctatgaatttaatcctaaaaacaatttagtgaattatgatttttctgttttttatgagtagacgataagactgttgattttgaagaattatctttttggagaaaagtaatagggagcggtgccgctccctatatctgcttaaaaacctcacatactgattatccatggttttgtacaaaagtcctctaacccatcaccaaacctaacatgaatgtcacattcacttttagaaatgtaaccttaatcgatagtagcgttttgtgctctaaattataatacaactataagaatcaatgtcctacgcataatcagattttatgggggtttatagatgaataagatcgtagaggtatcaaacgtaataaaggagtatggtgaaattggcagtacctttcgagcgcttaaggaggtaagcttaaatatcaacaaaggagaatttgttggtataatgggtccttcaggctcaggtaagaccacattgttaaatattatgtctactattgacaaagctactttaggagaagttttaatcgatggtaaaagaatagattattacaaggatgaggaccttgcaaaattcaggagagacacaatcggatttgtcttccaagcttttaatttattagacaatatgacaattagagataacattgctctgcctcttgcactaaacaatgtaaaacacaaaatcattctaaaaaaaattgatgaactaactgagctcttaggaatttcaaatcagttagataagtatccatatgaattgtcaggcggtcaaaagcaaagagtagctatttgtcgtgcgttaattacctctccaaaggttatttttgcagacgaaccaacaggggctcttgactctaagtcatcctcagaggttctagaatgttttaaaaatattaacaaaaccataggaacaaccatcatcatggtaacccatgatgcaaacgcagcaagttattgtaatagggttatgttcttaaaggacggtaaattacacggaagactagacagcagcggagataaaaaggaattatttaagaaagtgttaaacatgcttgccgtaatgggaggatcggaaaatgaactcctttaaaattgcctttaagcttttgaagaataatttaaaaatatatggattatattttgtggttttagttgtaactgtggcaacttactacaattttactgctatacagtacaatgaagtgtttgtccaattaactgaaaggtttcaatcagctgtagtggcaagtgcaacatctggctttgttctaatttgcacagtggtcttttttatgtggcatgccaatggattctttttaaaacaacgtcaaaaagaaaccgggttatacatgctaatgggaataagtacttctaaaattggaagagtattcgcaattgaaagtattctaataggcagtttgtctctattaatgggtttattgatcgggatattattctcgaaattgttcttaatgttattaagtaagtccatgacactgggtggtgaaattccttttagtatatctgcacaagccatcattcagcttattattgtgttcgggaccatctttgtaatgctgggaatgaaaaactatagagttgtgaaaaaaacacaactaattaatatgttgaatgcttcgaaagcaaagccctcacctccaaaatataattatacaaagggttttacaggtttagtattaattgctgcaggctatatagttgcactaaactttaagcaatgggatttggatttattgctttctgcgatgggaatcttggtcttggtcagcacggggacttatctgttttttggaagttctctgactataattttagggaagttaacaaattcaaaaaaaattatttataaagatgtaaggttagtcagtataagtaatactttctttagacaaaaagttaattatagaagtttagcgatgacggctattttaacagcagctaccgtaactgcattcaatgtaagcatttcgttcaaacagtttgaagcaaattatgacatcacagcctccccatacagtttaagttttgaaagcaattctgaagatgtcaaagataaagtcaaaggagtgattcgagagtcaaagcatgacttaatcggaatcaataagattcacttttttattggtaatgtccaatacgacgataataagcaaaatattgatccgaataacaaagctattatcactagttactcacaaataaagaaaacattaatatttttggattatagtaataaagcaagtattttgaatcaaattaaaccagaaattcatgaaatttcttttattctaaatgctgattcgatagcttcacctatttatgttgatggtaataaagtgagcattaataataataatttcctagtttctaaacatacacagctcccttttacagggaaaattaaaaaatatggtgacaaaaacatttatgttttaaatgacaatgattataaagaattaagaaagaaaaaccaagagattgtattaaatggtgtgcgaattacagatgaaaaagaaagtagggaagtggttaatagaatcaaggaagttgtaccaggtggagatttgaatgtaaatggaaagaatcaaagctttacatgggagtattatgctttaggtcaatttttctttttaggcctgattatgtccctagtattcatactagcgacctttagtacaatttactttaaaattttaagtgatgcattcactgatagggaacaatattcaatgttgaaaaaaattggtatgagtaaaaaggaagtgcagaggtctgtctatctgcaagttggaattgcatttttactgcctgtgattgtgggggcccttcatagcattgtagcaatgaatatgctggaacagattatgaatgtaaaattcaccattccaattctatgcggcatcggattatttgttcttataatggttgctttttatataggactctgtaaaaactataccaaattggtatatgaagagcagtaaaaaaatgagaaggattgtccagtaaatttataaagagagaggagatttcatatgtcatggttaactaaatggtcctttgctaataaagctgctattacgttaacatccattattataatagcctggggagtagtcagttatcttcgtatattagtgaagaaatcagagtcggtcaatcttgtttcacaaagcttagcagttgttgtgattggaggtttggcagtagcaaccatgcttaccttaatagtgataccatgcgtatatgaaatatttaattttaaaaaatcaaaaatgcaaaggcgtgaaaaaacattgaaagatgatataacaatttaaataaatttattgatgtttttggaacagggatcagaacacttttcgaagtcagctgtcggtgatatgaccggcggctggttatttagttagacgtctataaggaagcgctgcagcacgatcctttactgaaacatacggcggcagaagcggccgcccattacggacaggggctcacgaagctgcgagaacggttatgatgccattcctgatttggtgctgtccattgagtataaaaacggatctctgcgtgatgtcggtcaaagcaggcaatacggatctggggatacagattggctttctgaatggaaacgggagctgggtgtgcgtatataaaatgagaaaaaagctgacaaatgatgacgtcagcttttctttatgtgttttcttaaaactcttcatactccgctgggtcttggccgtttatgcgtccgtcggggcgggtaagcgaatcgataagtttcatatcgttttcatcaagggagaaatcaaaaacagagatgttttcaagctggcgctcgggcgatgctgattttggaatcgggatggcgcccagctggatatgccagcgtaaaatgacttgagaaatggttttgccgtatttgtccgcaatccgtccgagtttttgatcgttcaatacttcgccggcgcgggataacggactccatgattctgtcacgatgccctgttcttcgtgccattggcgctgctgctgctgattaaaagcgggatgcagttcaatttggttgatgcctggctttacgccggtttcacgttcgagccgttcgatatgctcaggcaggaaattgcagacgccgatggatcggatcagaccccattttttcgcatcaatcagtgcctgccatgcttccgtgtagcggtcttgtttcgggttcggccaatggacgagatacaggtcatagtagtccagaccggcgcggtataaagattcttggatggtttgtacagctttgtcatagtcatggtagcgcccgggcagcttggacgtcacgtatagctgttctctcggaacagagcttctgcggatggcttctccgaccgatccttcattttcatagttataagcggtgtcaatcagacggtagccgatatcaatggcgctggtaatggcatgaacgccgttgtttccattaagagcgtatgtaccgaagccgatcgcgggaatgcttgtcccatccagcagtttcttttgcggaattgctccagtcatcattaaatccctccttgttttctactttaccattattcttacaaatgaaacgtaataatggaaggaaatgagatgatccgcacatgaaaaagctgacggagaaccgtcagctttaaatttgaaacatccatgctacgacggggccgaagaccgaccctaacacggcgcagagcgtcatggaaacagaactcatggagaccgttaattctccgtactccattgcttttgaggtgccgagcgcatgggaagcgcttccgaatgcaattcctttcccgagtgagctgcggatgcggatccacttgagaagcagcggtcctaagataacgccggaaaaccctgcgatcatgacgaacacgactgtcatggaagggacaccgccgataccggacgcaatctgtatggcgacaggcgtcgtaattgattttgggataattgacaaaatcaaactccggctgatgccgaacagctctgcaaatagcaggccgctgaccattccggagaataaaccggccaacacgccgccgatgatcggaaacatatacttgattaacacccggcgctgcttataaagcgggtatgccaaagccaccacggcgggtccgagcagtgaattgatccattgtccgccgatcatatagtctttatacgaaatatgaaaaacaagcagcacggcgataatgaaaatcgtagtcgtcaaaactggtatgagaaagggatatggaaagcgcacatataatctcaccatagccagataggcggcggccgtgaacaaaattataacgattgcgatacatgcttgctgcacttctttttctcctttctctgattggctttgtgctctaacagctggctggcgtaccctgcggcgatcattgtgacgatggtgctcagcacgatgatcagaaacagagcagccccgctggcggaaaacagtgacgggtaattgatgacgcccgtcatggccggaatgaataagagcggaagaaaagacagcaaaaatccggctccgtcttcaatcattttgacgggaatgatcttaaccgataaacatatgatcagcaggatcaaaccgatgatgcttccgggaatgggcaggtgaaagaactgctgaacggctcccccgataaaggaaaatgcgaataaaataatgatttgcaagatgatgcgtatgactttcacgacaatgctgttctttggagaagagcagcttccccctttcttgatgtttctataagtttctttacttttggcacatatatttgtactatacaaatatatgtatgcaaaatatttctatatgttttctgagtaaatgtgcatatgtttgtattatacaactaatgttgctgttgtcaatgtaaggagtgaggcgtttgtcaaaacaagatccgattgaattaattgaatatgagctcaccacttttatcaggagagctgtttatcttgataactccgaccgtaaaatcggacatctggaaagggctgcgtatttgttattacggcagctggatgaattcgggcctgcgcgtgtgaaggaattggccgaatcatttaagctggatatttccacattgtcacgccaggcagcggccttggagtcgaaagagctgatccagcgtttttccgatccttctgacgggcgggtcagtctgtttgcgattacgaagcttggcaaacagaggttaaaagctgataaaaagatgcgtcttgagcggtatcatcgtatgcttgacgattggtccggcgatgaaaaagaaatgttcggccggcttttgctgcggctgaatgaggcatttatcgattaatgcatgatttttgccgggttaagcaggattatggcgtatacaagggagaatggaagagagtaaggctttacgccattctgcttagcaaaaataatattgaatagggggcggaaaacgtttctcctgggaaataatgtttctcggaggctgcggcatttattatctcaatattcataattcaataaaaatgaaagcgctttatttttactccattggttcagagtgtaaggtgtttgcctgaaaaaaacaattgtattttccacgaaaatttattatgatggaataaggaaattggagattatataacgataggaagatagaatatttctaatattgcgggaaatgaagattgagttaggttcaacaggtgcaccttctgcttcattatttcacatatatcagagctgttaagaggaggaagcgaagtggcaaacaaagaattaaagagaggcttaggcgcgcgtcatatacagatgattgcgctgggcggcacgatcggtgtcggtttattcatggggtcatccagcacgatcggatggacagggccgtctgtcctgctggcttatgcgatctcgggtatctttatcttttttatcatgcgtgcgatgggcgaaatgctctatgtagagccgagtacagggtcgtttgcgacattcggccataagtatatacatccgttagccggctatatgacggcgtggagcaactggtttcaatgggtgatcgtcgggatgtctgaaattatcgccgtcggttcgtatatgaaatattggtttcctgatctgccggcatggattcccggcattatcgccatggccattctcggtgcggcgaatttaatttcagtaaaatctttcggtgagtttgaattttggtttgccatgatcaaaatcgtcaccattattctgatgattgtggccggaatcgggattattttcttcggtttcggtaacggagggcatgcgatcggattatctaatttatggtcgcacggcggtttctttacaaatggtttttcaggatttttctttgctttgtctttggttgttgcggcctatcaaggggtcgagctgatcggaattacggcaggggaagcgaaggacccgcaaaaaacgctgagaagcgcgattcagagcattatctggcggattttaattttctacatcggtgcgattttcgtaatcgttaccgtatatccgtggaatgagcttcactcactcggcagtccgtttgtttcgacatttgcgaaagtcgggattacggcggcggccggtttgattaactttgttgtgattaccgctgcgatgtccggatgcaacagcgggatattcagtgcgggacgtatgctttatacgttaggcgtgaacggacaggcgccgaaattctttaagaaagtttcttcgagcggtgtgccgatattcggtacgcttgcggtattaatcggacttgtgatcggtgtcgtgctgaactacatcgcgcctccgaaaatttttgtttatgtgtacagcgcgagtgtgctgccgggaatgattccgtggttcgtcattttaatcagccatctcggtttcagaagagcgaagggcgctgagcttgataagcatccgtttaagatgccttttgcgccgtttacaaactatttgacgatcgctttcttactcatggtattgatcggcatgtggtttaacaaagatacgcggatttctttggttgtcggggtgattttcctggcgattgtgacggtcagctattatgcgttcggtatcggcaagcgcatgcctggtgaaaaatcgaaaatagaagacgctgtataattcaaaaagacacctctcttacaggggtgtctttttcggcttgtccgcgagtggtatactggttaaaaaaagcagaaccgggggaaacatcgatgagtcattaccgtacgttattatttgatatagacaatacgctgctggattttaccgcttcagaaaccgatgctcttcaaaaattgtttcaaggttcaaagctggagctgacggcagaggtggaagcccgttataaagcgttaaatcaagggctgtggcaggcgtttgaagagggggaaatgacccgcgatgaagtggtgaatacacggtttgcccttttatttaaagaatacggcctcgaagccgacggcgtgctgatgaatcaggcgtaccgccaatacttagaagaagggcaccagatgatagacggagcttatgagctgattgaacggctgagtcctttatttgatttatacatcgtgacgaacggcgtctcaagatcacaatataagcggctgggcgactccggtctgtatccgttttttaaagatgtgtttgtatctgaggacacgggttttcaaaagccgatgaaggaatactttgattacgtgtttgcgagaattcccggtttttctgccgggcacgggcttattatcggcgattcattgagcgcggacataaaaggcggtcagatggcgggaatggatacgtgctggtttaatcccggaaagaaagcaaatgagtccgggatcatcccgacgtatgaaattcattcgcttgatgagctgtatgatgtgctgaacgtggagcgaaaagccgccgctcatctgtaaggagaatacgatgaagattgcacatacgaagttactgatcaggggttttgcattactatcaatctttcatgcgattcttcagcttcctcccggccggggggagctgaaggtttttttgtctgtgctcgtgatgatgctgacggctaatgactgcctgcggccgctatatatgaagagaaggcctgctgtatatcaaggctcttttctcctgagcaacgttatcgcgggagttcttttgtacaatgtctatagtgtggggacacaggccgtaatggtgcttttattggcggaggtgcttattactgatcagcagatttcggctgttttgttaacggtgaatgccgccgcatttgccgcagctttatacgccggaggagcgggtgtcagtgatatcgtgcctccatacttcatcatgtttgcggtgatttatttatatcggaaaaacctgcaggagaagtcgaaggtagaattgctgaaccgagagctgaaaaccgctaatgacacactgaaggaatattcagaccggattgaggaactggccgttacgaaagaaagaacaagaattgcgcaggagctgcatgattcgctcggtcattatctggctgctctgaaaatgaatttagagtttgccgggaagacagccgggcatcagccggacaaagtgaagcagatcattcataaagcgcatgatcttacgaaagaatccattttaaagcttcgccaggcggttacgctgctgcagggctcgttgtccgggcgggcgtttgagcaagagctccgtgacattttcagtcattttcaagaggcgggaggcatacgcttcgagctggagacggacgcggcgatagaagcggaacagccggatgtgaagcattgtctttatcaatccgttcaggaaacgattacgaatgcgataaagcatggacatgcttcatatgtttctgtccggattcaaaaaaaccgaaacatgatattggcgcatattcataataacggctcagcctgcggaacgatcataaaatcaaatggtctgaaaggaattgagaaaagagcggccgcacttggcggagaggctgttttctcttccgggaaggaaacgggttttgacgtgaaaataaggattccatgcaaggaggaataatcaagtgaatgtcatgattgcagacgaccagtccattgtgagagaggggctgaaaatgattctgagtcttcacgaaggaatacaaatatcgggagaggcttcttgcggcgaagaggttctccggctgctttctcaaaccgaaaccgatgtgattttgatggatatcagaatgcccggtatggacggaatcgaaacgacaaaagcggtaaaagcgcgatatccttccgtaaaagtcatcattctgacaacgtttgaagatgatcactatatttttgccgggctgaaaagcggagccgacggctatctcttgaaggatgctgattcagatgaaattaccgcctctcttcaagccgtttatgaagggcagatgatgctgaatcccaaaatcacggtttccgtcgtaaaagcgctgaacaacatggagatccctgcggtgcagaaagagccgcggtcaaagctgaaggagattctcacgccgagagagcttgatgtggcgaaacacattatggaaggcaaaagcaataaacgcattgccgcagacttatttctgactgaaggcactgtgaaaaactatgtatccagaatcctcgataaacttgaagtgtcaaacagaaccgagcttaccttatatttgcaaaaattgctataaccccgcttcaccctcctctctccctttttatcactaaacacatgacgaaagtaatacccatatcgagtacgaaagtgaatagaaaacaaggattgccgagagtagaataagtgcagacatgacacaaggagtgctgcacgaatgctcgaattaacggatttgacaaagaagtacggcgattttaccgctgtcaatcatatatcactgcgcgtcgaaaaaggagagatattcggtctgctgggaccaaacggcgccggtaaatcaacaacggtgtcgatgatcagcaccgtgctctcaccgacgggcggaacaatctgcattgacggaacctcattacaggagcagcctgcggccataaaaaaagtgatgggagtcgtcccgcaggaaatcgctttatatcaagcgttaagcgcaaaggataatctggcttttttcgggagtctgtacggactgtccggtaaggaactttgtaaacgggttgatgaagtgctggatatcatccaattaaaggaacagcgaaaccaaagggtatctgaattttcaggcggcatgaaaagacgggtgaatatcggggccgcgctaatgaatgaaccgaaactattcattttagatgaaccgaccgtcggaattgatccgcaatccagacaccacattcttgaaaccgtgaagacgttaaatcaagaaaaagggatgaccgtcatttacacgagtcattacatggaagaggtcgaatacctctgtgaaaaagcggcgatcatggatcacggctcaatcattgcctgcgggacgaaagacgaattgaagcagtcagccaaagcttctgataccctgatcgtgaatgcagaggggctgaatgatgatgccgttaaaaaaatccgccgcattcccggtgttgccgaggctgctgtcagccagcagaccattacgatgctcgtctctgcggcagatcgcaatatccttgatattgcggatgatatcaggaaaaccggtatcaccattaagggcattcatttcgaggaagccaatctggaaagcattttcctccggctcaccggcaaaacgctgcgggattcataggggggcgtcatgaaaatattattcaggctgatcttattagattttcggttattggccggagcaaagtctttctatataaaactgattctgtttccggcactgatgatttttattttaggaacggtttttcacggcgattcgaaagtgaagccatttcagaccgcgttttataatgcggatcacgcggagagttctttgggcgacgtattaaagaatgacgtgctgaaacaaactgatctcatccgtgtaaaagacataggcagttaccaagaagggaaacagcttgtcgaaagcggcaaagtctccgtttttgtatacgtaccgaaaggctttgcaaaagcggcagaacacaatgaaaaaacaagtatcaaagtcatctcggaccaacagggctctgtaaacggagacattgtggaaatgatggccgattcgtttgtcaccagagtaaaagcggagatcagtgaagaaaaagcggtgctgaagaagtcgggacatctgtcaaagggagatgtcagcaaaatcatcagcggcctttcgggtgaacgtgaacaggctgtcaccattccgaaacagtcagccggcaatcacgcggctccgattgatgcgatgcagtattattcaatcgcaatggtcgtcatgttttccattatgaccgcgtttgcgctcattcacgggatagtggaagagagacagcagcacacgttattcagaatcaaatcaatgtctgttttacgtatccagtatgtggcgggtaagcttttgggaatcatgcttgccatccttatgcaaatggctgccgtcatcatcgcaagcagcatcttgtatcaggtaaaatggggcaatttgtttgaaatattgctggttacgattgtttattcatttgcgatcggcagtatcgtgcttctttgggggtttactgcaaaaaaccacgagaccgtctcaagcatggcggctcctattctgtatggcttcagttttttaggcggaagctttatcgcaaaagacggcttgcctgacagtttgaaaatcgtgcaggagctgataccgaacggcaaagcgatcaacagctatgtcagtgtcacgcagcatgccgatctgagcggtattgcggcggatttggcagagcttgccgccatcggcgccgtgtttttatgtttgaccatctgggtgtttaaacggaaggaggctgtttcatgacgcagctgttattcatgatcagacatcagctgaaactgatgctgcaaaatagggctgccatctttgcgacgatttccgccccgctccttctcacatatttcttttccttttctgcggatggcagtcagcagaaggaagtatatgtagctgatgaggatcagagcgcctattcagcgcaatttatgaaaatgattcagacagccggccatataaaagtcacgaaggtcacggaggacgtattaaaaacaaaggttaatcatcaggatatatcctttggattgctgatcggctcttattttgaagagacattattttccggagatgaattgaacgtttcatttattcagaatgaagaaaagggtgatgctgttttgacagagcagctgattgcgcagcaggcgggcgcgctgaaaaaaatagtccgcgatgcaaaagtgatatctcgcacgctgcacaccgacggaaagcaggccgcagctgatctcttgaaggatattcaggggcattccgccgtcaatgttgaccgccatcacgtttatgaaggcggacaggcagccgacagacttatcggatttttagtgatgtttatctggttcgttgcagtccaaagcctgcgatcatttataaatgaacaagaaaatcatacatatgacagattgctgagcacgcccgtttcctatacggcatatgcaatctctaagtttgcggcggcgtatcttttcggacttctccatattatcgtgatcctcgctgccggaacattcatgctgcatatccgttttgctgatcatgtttttgctgcgggagcggtgcttgcggcctgctcgtttgcgctgactgctgtaacgatggctgtgataccgttcatgaagagccaaaagcaattcacgtcgcttgcttccgtttttatagctgtcacgggtttattgggaggggctttcttcacattagacacggctccggagtacatgcggatgctgtcgttgtttacccctgaaaaatgggcgatcggcgcatttcaaaacaatggcggaggcagcatgcagatagtgccgctgagcctgtttcttgctgccggtgcagcgtcattggtcttatcactttatatgataagccgtcatatgaaaaaaaacggttagaagggtggctgctttgtatatggcagaaatgatcggaatcatagaattgctcgcgggagccgcaatgaacgtatggatcgggaggctcggaaaaacctttttcggtaaagatgacagaagttcgagagtcgtgttaagaatctgcggcatctttctcatgatcaacggcgtttcaagagcgtttcatatctagttcacaaagtgttccggactcttttataaaatgtaatctttttccttgtaaatcgtgtaaaatagtataggattctacgaaaagaataagagggggaagaaacatgaaaaagagactcgttacgctattcgcggcggccgttgctgttttgttgcttgtgagcgggttgtgggctccatcagcgtctgcggcgccggctcctgctttaacacaaatccgtattatcggtgtgacgtctgacggtcagagttaccaatgggaaaatatcgggccgaaccaaatcagcgcatcaaaaccgatgaagggtacaacgggttatttagccgtatatttccaagggtatccgaacaataacacgatccaggcgtttaacaacggaacgaatattacaagtcttacgtcaaaagcgctggaagatgaatatacgaaaaacggcaatatcgttacaggctatattaaatattacagtgttcctctttcttatgtcagttcaggaacgttctctttctccgcaacggggctgaacgggccgtacacgccgttaagcagcgggtttttctccattcaggtacagagttaaaacagtcgcccggtgctttcatgtatagtttttctctctttccgggaagctattcctatagaaaagggagggcttacatgatggacaggacactcggatatttgcgcgagtcgctttcgaaccacttggagcatgacgtgtgccgagggatttataaaaagcttcaggtgaagcattatgcaaatgagggcgagtttgtgaaagatctaaatgatttggaaatggatgtgctgaatcaggtgcttgaaaaggaaatcaaatatgctgagaacgagcaggatgagaagcgcacgatggaattgaatgaagtatatgagctcctgttttaaaaagcctcccggcggccgggaggctttttattgtttcggaaacagtttacataatcatccaaacctttgtataatggatagttgtgaaaaaaacagacggaggagaaacatgaacgaaataaaaaaacagacggttcttgagttatcatcggttgaaaaagctttagtttttctggtgccgccattattggggctgatcatcggatggtttctgccggtcattgcgaaatgggccgtaacattggattggctgcctgttatcgggccgctggaaatgatcgcttcttttcacggatggaaggctgcggctgtcatcgccgttatcggcttaatcgggggattgtggctgacgcggactgtttttaaagaatgtcttacggcggtcgtgacggacagcgaggtgtccttaaccatatataatgaagaaagcgtgtactcgaaagacagcatttccggtgtgtttacggatgaaaagcatcttgtcttattggggactgaagggcaggagctttttcgggagaagcttgagccggcggttgaaaaagcggctgatgcgtttcgcgcgcatgggtatgtctggctggggacggaagatccttttaaagaagaatataaacggtgggtgccggacacgccggatttggagccgggggctaatgctcttttaaaagcgagagaaaaggcgctgaaagaggaagaaaaggctgacgcgaaagagctgaaagcggaaataaccaagctgggcattaccgttcgggataaaggctcgcgccaatattggcggttctatcaaacgccgtctgcataaaaaagctgccgccgtttgatacggccgggcagcccgggaacagattatttcttcttgtcatcataatattgaaccgggtacatggagccttcggataccattttgttatcttcaatatcttcggggtgcgggttgcctgctttgttgacggggaatgattcaatatcctgcttcccggagagcgatgttttcatattgcggataaagttcatcaccttttggcggtttgatttatctttgagcaggtaggaagtcactccgacagtcgacacggcaagtcctgaaatgagcagtttttgtttcacgataaaaactcctttctatttctggcttgcagtagttattcccgcttaacggctgtttaaacatctgaagggtaattttggctttctgctttaatgcgataaagattgacaaaactattttcagaataatattataaatatatgatagcgctggagtcatattttaattgaaaggtgttaactttatgaatcaattacatcgcagaatgggaacgtttgcactcatgatggtcggacttgggtcgatgattggctccggctggttattcggagcgtggcgggcggctcagattgcgggacctgccgcaattatttcctggattatcggtatgatcgttattttatttatcgcactttcttacagtgaattgggttcaatgttcccggaagccgggggaatggtaaaatatactcaatattctcatggatcatttattggatttatcgcaggatgggcaaactggatcgcgattgtttccgttattccggtggaagcggttgcgtctgttcaatatatgagctcatggccgtgggaatgggcaaaatggacaagcaatctcgttcacaacggcactcttacgggagaggggctcggcttcgcatccgtattactgattatttactttttactgaattattggacagttaacttgttttcaaaagcgaattcattgattaccatctttaaaattattattccggggctgacaatcggagcgctgctgtttaccggctttcacggcggaaacttcacatccggttcaagcattgcgccgaacggctgggcgagcgtgctgacggcggtggccacatcaggtatcgtatttgcgtttaacgggtttcaaagcccgattaacatggccggagaagcgaaaaatcccggcaaatcgattccgattgcggttgtcggttcgctgctggtcgcaaccgtcatttacgtcctattgcaaatcgcatttatcggtgcggttgaaccttccatgatcgttcacggctggagtcacctgaacttcaactctccatttgccgatttggcgatcgcattgaatatcaactggcttgtcattattctttatgcggatgcgttcgtatctccgtcaggaacgggtatcacatataccgctacgacgtcacgcatgatttacggcatggaaaaaaataaatatatgccgagcattttcggaaagcttcatccgctgtacggcgtgccgcgccaagcgatgattttcaatctgatcgtatcgtttatctttctgtttttattcagaggatggggcgtgcttgctgaaatcatttccgttgcgacgctgatttcttatatcacgggtcccgtgacggtgatgacgctgcggcggacggcgggggatttataccggcctctccgtctgaaaggcctcagcgtggttgcaccgctcggcttcgtgttcgcgtctctcgtgctgtattgggcgcgctggccgttaacagggcaggtgctgtttatcattttgatcggccttccgatttatttctactaccaagcgaaagcgaagtggaaaggattccgcagaaactttaaaggcggcgtctggatggttttctatctgctcagcatgatggtcatttcatggctcggaagtgaaaaattcggcggtctgaacatcattccgtacgggtgggatatggggctgatcgcaatcgttgcccttgccttctatgcgtgggcgctgaagagcggcttcaagactgagtatttgaaagacgccaaagcaatcaatgatcaattaaaaggcggacaggcggaagccgctgccggaaaagaatagtgattgataaaaaccttgcggtaagttcccgcaaggtttttttatcgggcaaaaaaacatgggttcgatacagacgtgacgatgaatgagaaagcctaacgacaggcaaccaaggacagtattcttttttttctcatgatttctccgtcttatcaataactgtcttccatactaaagaatgaatgtaaaagatatgttgggcggctattaatcttttatgtttctttcttctccgtaacttcatccgttttcctgtacttcaagtcaaagctttagagacaaaacaaataattaaccacagaaaaaatacagtacgtaagtcgggattacaataattgtataataaattaaaatataggagattaaataaatagttggaggtaataagtatgaaaacgcgaaaattttttgcaacattatgcatcattactcccttagtatttggaggttttacgagtgttaaggctgtagactcgtataattcagaaacagtaaactacatattgaaaatgaatccgaatctgtcgaaaaaagaattaattgaatctgttaatgatctagttaaacaagataataaaacatctaatgagatcttagaggaaattaaaactgaattaaagaagcaagaaaagctagataaagaagaaggtaaaagtaatagaatgagcacaatgggcaagaatagcgggccaaaaattataggatcaagctctaaaggtaatgtttactatacacctgcatctacttttgggcttccgcatggacatgtcggtatgtactataagggaaatcaaattgtcgaatcggtccctaaaaaaggtgttcgtgcaatagcttcctcgaaacgtaaggtcgaaaaaaatgctgtaattcaaaatgtgaaagtttctagttctaaaaaaaataattcagtaaattggggttacagcagggttgggaaggatggttattcatataattttgcaacaaatagaaaatcgagtcattatggtgataaaaactgttcaaaactattatggtcagcttttaagctaaaggctggtatagatatggataaagataaaggtctgggtgtctatccaagagacatcagagattccaattatacaaaaactattaaaacattttgatgaattatgttcactccctaagtttatttagggagtcatattattttaaggagtgagattatatttgaacaagattaagtggcttattataattggggtcatagtattaataggtatatttatatgtattggaacatttaaatatactaattcagcttctgatgttaaacaaactgaaacagaaaaagaaaagaatttcttgaatgataaaattgcagctatatattattcagcaacaatagattaccctaaagatgggagttacactgtatatattgatgaaaaaggagcagcaacagctgtaaaaggagatgctattgaggttggaaccattgcacaagatgaaaaaaacatagttagacaggacaaaaaagaagtttatatgataggcgataacttcaaaaaattcccgatgcaacatcaagtacatacaagttatgggcagtcatcgggtcatttaataaaaggaaatatcttttattttttgaataatcaagaagtcggtaaaaaccattataatagcttaatcagatggggtaacagcaatggatttcatgaaaagattattccgggtttctatacaagtactggtaatgacggtgaatatatttacgtgataaatgaagattcttcaatcaaaacaccgacttttcagggtattaaaatagataaagataaagttacagttacagtagggaaaggaacaacaattcctatattaaatgaagaaaattggagtgtttattcacagataatagttaaaaaaagctcagccttttttatactatataaccaaacggataaatcaaacaaagtaaaattcaaagtagcagaaattgatttaaagcataataagtttaaaggggcatatcctttaggcagttataatatccctgatgaaatttctcaactggcaattcctctttccactaataacttttttgtgaaaaatgacactttatatcatttggcagctaattcaatactttatacttttgatctgaaaagtatggagccgaagaaaaaactcccattacatagatcaacaaaatttgaaaaccaagcaaaattcacttattttgatgagtctgaaattttcttgttagaaataagcaagggtgggaaatatgtgattaattcttactcttataaaaacggaaaaaaattaaaatctactcctatcagaggacttgaaaaaattattaacaatacccatgtttctgaatatgacttttttatgattaagaaaaacaaagaagtatggggtgattagatataaatggctagacagctgagtgagtatacttaaggggaaattaaattcacaaaggagaataataatggatgagctagatcttgcttttggtattttaccactttctattatcgtcttatcgattatattcacttatattttcaaaaaagtgtatataatgccgcttgtcagtatagttatttctgtcatactaatgtttactgtttttaatctatccttttggggatgggttgttgtctatggtttagtatcactaatattatcatatattacaaatagtgtaagaacgaaaatagataatagaaataaataattatatccttttgtttgtaaggtatcataggtaattcaaaattacagtgatacctttaattaatataaaggtgaatgtaagctttaataacatgctccgcccgctacataacccatgatggcgtttgcattatcgggcaaaaaaacatgggttcggcatcatctccgaacccatgctggctttatgatttgtattcttttttaaccttttggaatatatccgcatagttggtaaacacacctgttacgccccaattcagcagacggcgcatgtccgcctcgctgtttacggtataagggtgaagcagaaggccgtggctgcgaatgtttcggacattttgagcgttcagcgctttgtaatccggtccgattccgacggcatatgtttttatgtccgttaaatctgcgtcagtcattgacatcatctgttccgcttcaagcaattggacggcgggaagtttcggatcgagctgtttgattttcagaaggctgtccctgctgaaagactgaatgataacttgtccaagtttcgcatgcttgcctgccaatttgtattttttcagtgaagcgatcagtttttcttccatacccggatatgtttcgggcgcctttgtttcaatataatagtttgcatgtctgccgaaccgttttaacacgtcatcaagtgtgggaacgtggagtccggcgtattgcggttttgctttttccggataggccttattgaaccaagagccggcgtcgagcttttgaatctcggctaatgtatgatccttcacccagccttgtccgtttgtggtgcggtccagtttttcatcatgcatgacgatcagcttgccgtcttttgtcatttgtaaatccagctcaatatagtcagccttcattttttgcgcagtttcataagaaaggatcgtgtgctccgggacataccccgaagcaccgcgatgggcaatggtcaaaattctgtcaggagacaaaaggtttccttttcccgccgccgatacaggcgtgacgatgaatgacaataaaccgaataaaagcaataccaaagcaaacaacttatgtttccgcatgttttcttcccccttaaaaatcaatatctgtctctagtgtagaaaatcgttgtaaatgctgtactgcaaaaatattaatcttttatgttgttttcttacacatgctccgcccgcttgcccgtattccacgtcatagccaagaagacgatggacagcacgcatgaggagataagcatgataaagccgccgttccagtcaaagcggtctacgacataacccatgatggcgttggcgaaagcggagcctccgatgtagccgaaaaacccggttaagccggctgccgttcccgccgcttttttaggcgcaaggtcaatggcctgaagcccgatcagcatgacaggtccatagattaagaagccgatgctgatcagcgcgatattatcgatgagcggatgaccggcagggttaagccagtagaccaatacagcgataaatacgccggccatgaacagtacgcctgccggcgcgcggcggcttttgaaaaaacgatcgctgatccagccgcacaaaatcgttcccggaattcccgcatattcataaaggaaataagaccatctggaatcttcaggagagaatcctttcgcttccgtcaaataagtcggcgcccagtcaacgacaccgtaccgcacgaagtaaacaaagacattggcaaatgcgatataccacagaaatttattattcagcacgtatttaaaaagaatttctttggtggtcatctctttttcctggtctttgaacgcatgtttcggatagtcattccggtattcttcaatcggcggaagcccgcaggattgcggcgtgtcccgaacgagaagaacaatcacaaatgaaataacgatggcgataatcgccggaaagaaaaatacgcttttccaagtgacaaacatggcgatgccgagagtcacgagcggggcgagaatacctccgcctatgttatgggcgacattccatatcgacattttcgttccgcgttcactgatggaaaaccaatgagccatcgtccgtccgcaaggcggccagcccattccttgaaaccatccgttaataaacataaaaatgaacataatcgtcacgcttgacgtgacccacggcatggaaacaaataaaatgtttacgacacctgacaaaaacagacctgtcgcaaggaaatacctcgggttgcagcggtcagacaccatccccataataaatttactgaagccgtaagcgattgatacggccgcaagcaccaagccaagttccccttttgaaaacccttgttcctgaaaataaggaatagcgaaggcaaagtttttgcgaagcaaataatacccggcatacccgatgaaaatccccaaaaatacttgcagcctgagccgtttataggccgcatccgtctttgaatcatccaatctctcaatatgcggagccggcttaaacaattgaaacatcatatcctcccctttgctgaacgtctatcatgatgtatgtatgactcctttccttgaaaatgacaaaaagaaccagaaatcacccttgtgaaagggcggggtttcctggttctcctcatctccatccaaaaatcattaacttgtgtatgatagcgctttcttaaattatcacagtctgacgtgaatgtaaacgctttaaggaaagttttcatttttttgaataaataaccggagggaatatcagccggagcgcgaaagatttgaagtactcgattttgtactcaggcataagatgtgttaggccgaactaagaaaagcgaagggagtgcatctgttgattgatgaattggattttgcgttcggtgttctgccgctttgtatcatcatcttgtcagtcgccggaacatatttgtttaaaaacgcgttcattatgccggctgccgctttggccgtttgccttatatgcacctttaccgtattgaatttctcgtttatcgggtgggccgtcgtgtacacgcttgtctctttcgcgttatctcatattacgatggtggtgatcagccaaaataaaaaataggatcggcggcagccgatccagctatcaaaagcagagatgcgctctctgctttgttttatttatgaatgtgcaggaattccttgatgaccgcggtctgttcttctttcgggtagcttctgtacagatggctggttaagcggacgggatcaccgaagaagtaccgctcatattgtgtctgtcttgttccaaaggggctcatggtcaaatcccatgcgaggcggaacacttttacccggtcctcagcgttcaattcggccgcctgcaaatattggtcaaggtctcctctgatgtcagaacggaacgctttttcagtcggcaaagtcaccattccgcttgccccgatcagctgaatgatttccgtgaagcgcgggtagatgtcaggaaaaatcgcgctgaccacacgaagcggagtgacactcggacgcatataaccccattcatctgtttccgcatcattctccgacttttccaaaagggctttcatcgtttccagaccggtgatgatttcagccatcttagcctgaatatgctgatattcgcccacatctatcgcttcgacaagcgtttgggcgaggcccaggagaaactccgtttttacaatttgtctcgtgataacttgatgaaatgcgaaggcgttaaaagagcttttcatattaaaatcaaaagccgcctcataattattataaaagaatacgcgttcccaagggaccaaaacgtgatcaaatacaacgatagaatccatttcttcatatcttgagctgagcggataatcaaacgctgattttccgagtacgaaagattccctgcagatgaattttactccttttgtattggaagggattgaaaaagcgaacgcttcatccgattcaaaatacattttaggcagagaaaccacgagcacttcatccgtcaggccgccttgtgtggctaaaatccgggcgccgtgtatgatgaggcctttttcatttttatcgacgacttttgccgagataggtgtcggcgatacgtttacacccatttgtgaacgattcacctgaggggtgataaacgtgtgcgtaaaagaaagatcctgtgcagcagcgcgttcgtacagcgcttgaacatgttccggaaaacaatgctcgcggtctttcaaaagcgcggcggaggaggcgaagctcatcagcacggtattcatataatctgggcttcgacccatcattccgtgcgtgtgtctggcccaatgttcgaacatgtttcttcttctttttacgtcatctttcgttttcggctgcaggtatgaaagcccggcccgttcttttttaccgggaagactgtaagtcatttgatctttcatgtccggtttcgtttgcaaatcataaagagagcgcttcgtttccagaaggcccttaaatgcgggatgttcagaaatctgtccctcgatcttttcaccatcgagccaaatctcatttccaagctgatttaatcggtcaatgaacatttttccattaatgatacccatcatgtcgcccttctttctttgcagatccactacctcattatattgaaaacgaaattgggtgttccggttatttccaaaggggaagagccttttctgataaggggggtgaagggtttgcataataaaaaaaccccttaagcagagggggtttttaactgatcatgtctttgtatcgttgttcgaggacgaagtctatcattccggtgatacgggtgttttcagatttttgtctgaaacggtcagacacttggatttttcttgaaaacggaaatacagcaataatccaaacaaggccggccagaccgaaaaccatctgcagagccatttcaatcaaatcattaaaatgagtgctgaaaaaaaagatatataacgtgatgaatgtgactgtacatacaattttgacagtatgttgaaaggtgaggggcggttcagtgaaacacattttcatttgattcagtgtgagcgaatcttgtttcattaagtatgtaagcagttcttcgtcattttgacttcgcggaatcaaatcggtttctattttttgaacggtttccttgtatatctgcatatcaatcttcatgcgaatcctcctttagaaataactccaagaatactcattgagcattcctggagcaaggagctgcctgttcaattatagaaatagtgataaaaccgtgctgaacaaggctgcagctcctcctaattcaggtgctaaaacgactaaagcaccgatccctacaataacaataattcctgcgcctgcaatagccatggtattcacgacagaatcccaatccggggagtacacctcttcggaatccggcaacctgaagctcttttgttttattttaaatgtaatggtagttgttagtccagttgtagcactgtcaccgaccggaatatcaggtgtataaattttaaattgaatattcagcgatcccgcagccggattgacatacacttctaaataaccgttgcggactgacaagctcagactgttaagcaggttttgataggaatcaatttgtgatgctgtaaaagagacttgtgaatctcccatcagaccggtaatataagctcccggtttgccatttgtaatggtaactgtgttgggagaaccttcgcttggcactgttgccaaaagtgaagtagataaaagaatatccatttcaggtgatgtataaatggtttctgtcttgtcgaattcaaacatggcattcgcaagattcgatatattttctaaagcaggaatggttgttaaaatgtccgtcagtgtgcgcagtcttgcatcatacacaggatcagaaggcggatggacgctgcttgcacccgagtcttttccggagtatccgtctttgtcaatggcgacttttcccgctccgcttccgatcgttccttcataaaattgatcaaaagcccagtttttcggcatcgggtatccgaggttgccgctgaatccggtcgacatgttagccgtaaaactatatttggtcagacctgcttctgacgtccggatacaaatgtttctcggtccgtataccccgatttcatatttcggcgcagttgagaacgcctgcattttcataaaagctgacttgatttcttgaaagtaagggatgattttatccgtgacttcataatcatacgcatcgaaatcgacggcaaagtaaatggtcgttcctgacggaaagcctaatcttcgggcggctgatgcagcgctgtacgcatctctcgttccttggtcttttacaaaataagaagattcatagccgccgtcctgataaatcggaaacacgcttaagccggcattgaaaatagtggagagttcttttgacgttaatgctttcgatgtcagtccgctgcttgtccgcacattcccggtcagatatcttcccacgatcttatagccattctcacgcaaagttttggccgtatctgccgtcaaaatggaagcggtgtcacaagctgaagcagcacgggttgtgtcgcctgagcttgataataaagctttaatcgtcggcatgtccgcataaccagtctgcggcaggcacataaacttttggaaagctttcactgccgatacaacgccgacgccgtattttccgtcgaattcaccggggtcaaatgatttcccattacagtaaagcgcgtattgaacaatcaaaacaaagcctgtccgtgaatcgccgggagtcaaggtaggacataagctggtcgttccgtttccgaaaaatccattggcgacgcttgtgctcatgccttcttctttttgcagggcataaatgagagccttgtttgtatcgcgggcatataagccgtcacaaggcatcaagccgatgtagtcattgtaatcccggttcaggttctgctggatttggcggatttttttgtcgcctcccgctactaaccgaaaagcgctcatatccagcaaggccttcataatgagtgccgtgacgatgccgtcttgcttagtgagcccggccgctttttgaaactcttttacagcattttcggtattttcatagaaaacgcctgaaaatccgccggggttaaaacctttacaccacagcgccccttgcagaatgtaattcatgtttgtcggcttagaatcgggagcctgctttttcaacggcttaaacaatctttgtgtcgttgggccgaagttatcggcaggttctgaaataccaagctcaatttgaagcgcccgtgtcagaccgtaaatggtatcccagcccgtttttccgttttccggcactttgttgtacccgtgtctgcctttgtacgtttcattcagccattgttgtgtttccaggaccatttcgtccattgcaatccctccattaggtgtagtgtgcgttcattcataggtggcaaacgtatgacgagaaaaagtgattgtaaaggtataaagatgagtaatttatataggaataggaaggttatcaggtatatagggtaattaaagtaaaaaacatataaatatccctttatttatctgaatgtttaatctataataaatttaaacacatagataacattgaaatacaaaggagtgacggcatgagtctaagaatattggttgaacctgaaagtaactttataacaatgtttggattaaaaggaaagcaatttggttacgatgtgatttcatgtcaatgtacagttgattacatacttaaatttttggatgtagataaaagtgttcaaagagaaatagcagaaaaacaggtttctaatataagtaaatatatacaatacggaatggagggcaatgatatctattttcctccactgattttttctgcgagaggtaaagggaagtttgaacatgataaaagccagtttcatttacataatggtgagaaaatggtgatactggatggtcagcacagaattgaagcgttcaaaacgttgaaaaagaggatagaagttaatggtgctgatccaaaaaagcttgagtatataaacgaattcccattaacaattcagatttattcagacttaaataaaaaacaagaaaggcaactgtttactgatgttaatactaaatcttcgaaagtaagtaacaccttgttaataatgtataaagataatgatttaaatggaaaaattgttaaagaaataattaatgatcatccatctatttctcctgataaatttgaaatacgtgctcaaagaacaactactaaacttatgaccgcatctactctatacaatattggtttagctttaaatgacggtaccctacaagtgaaaaataatacctcaaagataaataaagaaaactttcctgaatataaaaaaaggttagaggacttcttaacgcttttgcttaagtatgcaccctcacaggctttagatagagacaaatatttcatcttgaatccttatgtgctacagggtattgcaagatgtatatactccctgagagaaaacaataatgactttaatatggaaactttctttttaagtattttttcaaatgttgactggacacataaaaataaagaactcaaacaattaggaatcccttttaatccaaaaacaaataaatacagattcacggttggaacaagaacagcaattcgaattaccaatatgttgctacaaaaagtgtagggagaaaggggctttgatggtgttcgaaaaaaggttaaaaggtcttattaatttaataaatggaaaaaataaaggcattatgactacccagctatcagttagagatttgttggacatttacgagattgataatagagtcaatagagacattaattattctcggctaagctcacttgccaaatatattgattcgtatgactctggtattggaatatttttgccttcttttgtcctggtgtttaaaggagaccctattaatttttatgatagaagcactaaagaattagtattgccacaaggttttaagttaagagtcattgatggacaacatagaataaaaggaatggaatatcttttaaaaactatagttgatactgaaaggaaagaacaagtattaaacagtatagttagtgctcagatctactttggtttatctgataaagatcaaaagaatgtttttgtagacataaattcaaacgcaaaaagagtttctatgtcattaatctcgaaatatgatacaagagaggttatgagagtacttattagagacatatatcaaattaacaaatccctacaagttgctggtgtagaattcgaaaaaagtagaatagtgagaccagggagtaagttatttagcacgagtgcacgtttgaatacttttctgactttacttttatttggtaaggctaagttgagtaaaacaaacgaacagatcttaaaagataattatgatgatgtattaagcttcttaaataaatttttcgatgttttttttgagatattacctgatcagttaggagatgtaactaaatatacattgggacatgaagctttgcaaaatgcaatagcgctatatttacatgaattaattatgattgaatcaataaacgttatagggtggaaggattgttgggaacaggaagttgaaaaattgggggaatttgattggaccataaaaaatactcatttcacggaattcatgattgacagcagatctggaaataaaaaagggtttaagacttttattgataggcaatatgatggtatattagaaattctaaaaacacaactagactaatttaattgtaagatatacaagtttttttacacttagccatactttattttaataaccttttacatttttgttttgcatatatggtttcaattagttcgggttgttaatgtcctgtaattttctttctatcaatatcatcacaacgggataatgtagagtattccttaagttgttgctgttacagtcatgcaagcatgaaagcatagagcccgggtgaagaataaaaaacagatcgtcaataggagactgatccctgtttttgtgacggggatcaaaatgcttttaagcagccagctgtcggtatatgaccggcagctagttgtttagtttagataaagattttctgtctgtagtttctctgattcggaggaatacgctggaccttttttgtaagtgtattgctttcgaaacaggctgtgtgaatctgtgtgtattttagctttattatttgacccatgttgaacctgcttatcaatactcaattctgcataatctttttcataagcccgcccttagtctcctctcgtcagccttttgtttgacttcaactccatagaaaaaatagctccacaatttattgatccgttttcaaatttgaaagtgtttttgtttgtctcatagtagggggcagtttcaccacgatctgtttattgcttaaatctattgagccgctctcttataacaatattgaaaaaatctttcacataggtctaaaatatcttgttttcttgtcagtctattaatccactcttctggaatactattgatctcatagcacatgccggctaacgtacctgtaagaaaagcgatagtatctgtatctcctcccaggttaactgcttctaagactgcatccctatagtttgtatgtttaaagaaacaccacaatgcagcctcaagagaatgcacaacatagccgtcagagataatatcttcttttttcgcatctaaaatagattgatcaaacacgcgtctgtaacataccaattcatctctatattttatatccttggatagttctgacctgcaggtttctgttgctcgttcaaaagcccgagctggagtattattattaaataaatggatgagaaattgtatataaacaatacaggctagtgtagatcttggatgcgcatgtgttaattccgcccaccgttcaatttccctttttcttgtcgtgaagtctttttcattgcataagataaaaactaaaggagaaatgcgcattaacgcgccgttgccgttatcaaactcagtgattccgccgcattgacgaacgtttttctcttttaaaaagcgctcaatggcttcatcagttgttcgaccgatatcaaacatatggccgtgcggtgtccaataaccatcttcccggtatgaggtgaatttttccatcaattcaatttcgccattttcctcaattaaattttctatcaagcataatgtcaatgatgaatcatctgaccacgtccccgggggctgattgtaagtaccgtatccggtcatgccgtttacttctaaattcctgtccttgaattccacgggtacacccagtgcatccccgacaatacctcccaatatcgttgggaaaagtttctcttttatagataagcctaggtaaatacggtcatcgtcgttccatctgtctttcatttttcttctcattggtttgcacctactttttaattaaatctaatactaaatgtattttttcatctgcatcgagtttagcatctctaataatcatctcatgtccggagtttaaaagaatctctgcctcttctggaaagtggcttactttcgcaatataggctccgttagttcctttaggaacattgatggaataggaaactttcttataatcaaaagctgattccttaaggagggcagtgctcatgaaagcatcgtcttttattctctgcccaactaaattatttatgagcccttctgtcagcacttcgtctctaggcaggatctttcttaaagcaattaagtctgtaccgcgataaacaacaatgtcttcggggatttttgccttttccagcgcactatgaatatcagtaatttttgtaggattaattccatttaatgagctattaacgccccgcaaatacgcattgatatcttcataatagtctccggtataatcaattagagcttgtttttcttccgcagtaagagaatttatccatttgtcataatgtttttctccccaaatatgtgcctgttctagattatctatttttcgaggacttgtttcacttatatccagatcccttttgtccctgaaggacccgttaaaatttaataaggtctcctgcttcacatcaattgctttccccgccggagaaggtgattttccaattccggcaagcgcaggcttccagggttgagaaatcgagctttttccttttgtgtaaattccagctgctacttttttctgatccgcaataaaggtctttgcttccttcgtcacaaatctcccgacccttgtcactccggtaacttctccggcgccttttgctcctaagagggagacagcagcgtaagcgatatagtgggtgcggctgtaggtgtcaccgtgaatgatgttttcattccatgaagttttgaaggattgaaccatataatcgaatgtttccggtgcattgtaaatggcgccgatgagttcttgtccggctttggcctgttctattgttcctgcgtgtccttgtgctctttgcagccagattgcgaaatcgtaagcgccaatgacggtgtcttttcctgcatcccatatcccaagcgtaatgccttttgccccgtcgacgagcatttgtccggcttggcgcatggcttttagctggacgaggcttgagtaatattgtaattgttcggcgctcatgttgtcagccccgagtttttctgcaatgtttatatattcatccgggtcagaaatgcggtccagttttttctgtaaaaaggcggtttcttcctgctgtttcattttgatgtattgatgggcttgtttttgtatgctgtcttttcttttatatacgtcagtatcgtgaaatgctttggcgttaaaagattgcggaccgcctgctttacttgttaagtcggccagcgtccggaagaaggcttcaacttcgtgttcaagcgcttcagattgagcgtactcgtgaaccagttttgcgtcgagtttatgtaagtgttctgctgtttgccgttttttgtgatcggaggcatcaagtttgccggtaaccgaagatttgtcaaacggtgataaggacaaaatgtcgtcaattgatcctaaaattcggctgatctcatcatgctggccatcaatgatatggtaagctctttgcccggcatgcttaagctcactatcaagaaacgattcttccagcaagtcatgccggccgaagcccgcctgttctatttctcttgggatgcttttgaaaaaagtaattttcatgtcgcagagatcaagccaaagctctgctccggcggcctgttcagtatagaaggctttaatggcgtccgcgccttttcctgacatggcgtccgtatttgcaatgccgtgaaactgctgttttaaagcaatcatgtcatctttcgttttttgataagctttcagacggctgtttgctgattgaatgagagtattggtttcgagtaatttcatatacagtgtcctttcgcctgattttctccgaccgtattttaccatgaagatgccaatttctgttcgtaaattgagaaaaagaggaaaagggtacttttttaccgattcttttgattcatttaaaaatgtaccgatataaaaaaggcgtgccccggtgtaaaatggctatattgataaatatggaggttgagatggatcaagattatatgactgagcttgtctcagtccagctgaagaaaatccggtcggagagaggctacacacaggagaaaatggcggatgtgatcggtctttccaaaaaggcgctggtgcagattgagaaagggcgggcgcttgcggaatggccgcacgttgtggcggtttgcgcgcttttcagatcaagtgaaacactgcaatccgtattaggagatgatccgctggaggtcattgaagcggttgcccatcgcacaattgacaggccgaaggggaagacgatgggcggcaaggtgtggtggaaaaccatcgagaaaaaaggcgagttccgcttgcagcagcatttgatttcccaccattaccgcatccttgattcctatgatgatctgtggttcagcagttttgaaaaggcagaggctttggagcggcttgatgagctgtttttggaggcggaagaagcgaagcgctgagcacctccggttgatgtattttctgacaagtgggaaaatatatataaatttcagccaaaggagagattcgaatgaagcctgaagatatcgtccgaagcggcccgaatcagtacatatgcaaggaaggaatcgcaaaagaacttccggggctgctggagacattcagaaaacccgttattgtgaccggaatcaaatcctatcaggcgttctccgattacagcggcggttcttcctgggatgtgattcagcataaaggatactgttcacctgaggcggtgcgtaaggtctgtgagcaggcggaagacgcggatgtgatcatcggtatcggaggcggcacgattttggatatggcaaaagcggcggcagaccggcttgatatagaggctgtgatggttccttccattgcggggacgtgtgcggcaagtacaccgttgagtgtcatatatgatgagagaggcaattttatcagagttgattatcataagcgttcaagctatttgacgcttgttgatccgctgtttttgcttttctctcccattgaatatatgaaaagcgggatcggtgatacgctggcgaaatggtatgaggctgaggcggtcatcagaaatacggaggaggcggcgccgctgatggcgcaggcggggctgaggcaggcggaatatatccgtaatctgttattgcgttacagtgaagcggccgtcggaagcatggagaaaggcgagctgtccgtgccgtttatccatacggcggaaacgatcattatgcttgcgggaacggtcggcgggtatggcggccgtttgtgcaggatggcaggggcgcatgcggtccacaacggactcagttttcttcaggagacacatcaggtgctgcatggccagaaggttgcttacggcatattggtgcagctcgcgcttgagaatcggagacctgagattgaagagctgcttccgttttaccgccggctcggtttccccgtcagtctctatgatctcggcatccttgacaatcatgaggaagccaagctctgtattgcttctcacgcctgccgggcggaagaatcgttatgcttaatgggacaatatcgcgagaaggacgtgtcagctgcgattgaatcgctcgaatcagcgcaaaagacaggatagagctgtcatctatcttgtctttattttttgaatatttccgttataatgagtggggtatagaaagggaggggccaaaggacatgtatcaggcgaagaagatgttgttattaggatcaggcgagctggggaaagaagtcgtcattgaagcgcagcggctcggggttgtcactgtagccgttgacagctatgagcatgctcccgccatgcaggccgcgcacaaaagctatgtgattgatatgcttgataaagcgcaggtcagagaagtcattgagaaagaaaaaccggacttgatcgtgccggaagtggaagccattgcgacggatgagctgctgaagcttgaggaagaaggttttcacgtcattccgaatgcgcgtgcggcaaagctgacgatggaccgtgaaggcatcagacggcttgcggcagagacgcttcatcttccgactgccggctatgaattcgcgaatacatatgaagaatttaaagaagcggcggaaacaatcggctttccgtgcgtggtaaaaccgctgatgagctcttccggaaaagggcaaagcgtgtgccgctcggcttccgggctgaaaagctgctgggacatggcgatggaaggcggccgagtgaaaaacggccgggtcatcgttgaggaattcattccgtttgaatcagaaatcactcttctgacagtgcgcgcggcgaacggtacgtccttttgcgcgccgatcggacatgaacaaaaagacggtgactatattgaatcatggcagcctcatcatatgacggaacagcagatcaaagaggcgaaacacattgcgaaaagcataacggacgagctcggcggatacggtttgttcggggtggagcttttccttactgaagataaagtatatttcagcgaggtgtctccccgtccgcatgatacagggctcgttacgcttgtgacgcaaaatttgtcagagtttgcgctgcatgtccgcgcggtattgggattcccgattccggaaatcactcagctgtcgccgggggcaagccgtccgctgaaggcgccaaaagagcttgctgattatgcgcttgaaggtgtggagaaggctttggcggtaaaaagcactcaggtccgcgtattcggtaaacccgtcacgaaagtaggacgccgtatggcggttgcgctttctgcagctgagaccgttgaagaggccagagaaagagcgaccgaagcactcagttatttatcaattacataaaatgatcttaaaaggcgtttttaccgtaatggtaaggcgccttttttgtttggacagactatatactggaaaacggggttgtgagataatgtatgaggccgttttgtgccggctttttaattcttgaaactttttatgtccgcaatcgttatatgtaatgttctcatttcacggagaaggaaataacaatacatcatacggcttttcattcatcaagaacggacaatccgattctcagcatggaatatttaagcagggtaatccggaatagaggaaaccatgattgcttaccttaatatgaacggcgaaaaaacaaaaatcaccagattagattgttcaaataacaccaaatgctgtataataaaagaatttgaatgatagcattgaaagaattccattttatgtttccgtaaaatggagtctttatgcatacgcagtccgatttgatatggttttaattggaggtttgtgtaaactgtgaattatatacctagtatgattacaattggaaatttcatttgcgggctcttatcgattcattcccttttgtatcataatatacactctgcggtgatctttattttcaccgggatgtttcttgatttctttgacggtttggccgcccgtaagctgaacgcggtatcggagatgggaagggagcttgactcttttgcggatctcgtgacgttcggcgtagcgccgtccatgctcgcttacagtgtttcactatatacgattccgttcatcggaattttaatcgcgctttcctacagtatctgcgggatgatccgtctttccagatttaatattgaacaaagcaagctgccgacgtttatcgggatgccgattccgtttgcgggtatgtgtcttgtcattttgagctttatcaataacgcttttcttctgggggcgggaacgatcgcgctcggttatttaatggtcagcaacattaaatttccgcactttaaaaaacaggcgcctgaaaacctggagagcagaagatggaattagttcagcaattaatatccgattacggatatatcgcgatttttcttatgctgacactcggtattatcggattgccaattccggatgaagtcatgatgacgcttgtgggctacttcgctcatttaaacgtactgaattacgggctctccattctgatcagctttatcggagcgctccttgggatgattatcagctacttcatcggcagaaaagccggccggccgtttattaataagttcggaaaatgggtcggcctgaaggaaaagaggatggagaaagtagacaggtggatgaagaagtacgggccgtacaccattattttaggttatttcatccccggcatcagacacgtgacctgctacttttccggaatcggcagaatggaattcaaaacctacttatgcttcgccgccatcggagcgtttttatggtgttttatttttattactataggaaaatttataggagtaatcaatgtttaatactgccgctaaagttctttaccgttcattgattgaactgactaataatcgattgacgtcttatctcattaaaaacttctgtgaatcgaaactgagcaagccgatgattccgctgttttccaaacactatcgcatcaactggaatgaaacggaacgtacggcttctgactttgattcactggcgtcatttttcattcgtgatattaatttaaatctccgccccgtggcaaaagagaagaacgccatcgtcagcccggtggacggtgtcgttcagacggttggcatgattaaacccaatcaaactttcatggtaaaagggaaggattattcgttcgccgaactgacggggtttaaaagcgccgatcacaagtataacggcgggtgttttgccgtgctttatctgagcccgagacattatcaccgcttccattctcccgtcagctgcacgtatcagaagctggccgagttggggaaacgctcctatcccgttaatacgatgggattgaagtacgggaaagatgtgctctcaaaaaattaccgttatgtgtacgagctgacccgtgctgaccagcagatgctcatgattccggtaggtgcgatgaatattaactcgatcgttcagacaaacaccggaaacaggcttgagacgggggaagagctgggctatttttcatttggatcgaccgttattttagtattcgagaaagatatgtttaccccttcggataacctgactgaaggccgtgaattacaggtcggtcagatcatcggttatgcggagtcacaggaggaggcgtccgctttataaaagctgctcctcttttttatatggtgtaaggaagtgaacattatgaaagaaaaggatttggcaaagctgatagagcagtaccatcatacaggggatcagcaaattcttgaagccgtgcgggacgcatgccggcctgtcgttgaggagctcatctcagaactggctgaagacagcgccgatcttctgcgggcaaaaggccgtgaccgttttccgtttattatcggcaagtatcagaccgcggccggcctttcgcttgagacctttttgcgcaacacgtatcggttttattttcagcaggttttaaaaggcgaagcgtgactggaagaaagagtccggacggaaatgttcatctttcgcccgttttcctgtatgatatagtagagtgtgcgatcattaatttaattgaacagggtgtataaatcatggaaaaacaatatagagttttactttattataaatatgtaaagattgatgagcctgaagagttcacggctcagcatttgaagttttgtaaggagctcggtctgttaggccgtattttgatttctgaagaaggcattaacggtacggtgtccggaacggttgaacagacggaacaatacatgaatgcgctgaaagctgatccgcgctttgccgacatgccgattaaaattgacgaggctgacggacatgcattccgcaaaatgtttgtgcgccataaaaaagaattggtgacgcttcgtctcgaagatgatgttgatccgaatgtcacgacgggcaagcatttgaaaccgaaagatttttatgagcaaatgcaggatcctgacacgatcgtgatcgacgccagaaacgactatgagtatgacctcggtcatttccgcggagcggtcagacctgatattgaggcgttccgtgagctgccggactggattgaagagcacaaagacatgcttgaaggtaaaaaaattctcacgtactgcacaggcggcgtacgctgtgagaaattttccggctggctgctgaagaagggctttgaagacgtgtcccagcttgacggcggtatcgtcacttacggtaaagatcctgaagtgaaagggcagctgtgggacggacagtgctacgtgtttgacgaaagaatcagcgtaccggtcaaccgcgtagagcacgttatcatcggaaaagattatttcacgggcgagccgtgcgagcgttatgtgaactgcgcaaatccggcatgtaataaaaaaatgatctgcacacctgagaatgaatacaaatacatgcgcagctgcagtcacgaatgccgtacgaacgaacgcaacatgtatgtgaaagagcacgaaatgactcaggaagaaatcaatgaacgtcttgctttgattgaaaaagaggatcatgcggcgattgattaatagaaaagaccaccaatgaggtggtcttttttgtgtttacatactttctgtccgggcagtctggtctgccgtgacgggtcctttatatttgaatgctttttcccacttggacacgacgatgcaggcgaccgcatggccgggcacgttgacgccggttctcgccatgtccatgacgcggtcgacaccggcaatgatggcgacgccttccgcggggagaccgacggcattcgctgtcgccagaagcacgacgagtgagcctgacgggacggcggcaatgcctttgcttgtcatgacgagcacaagcatcatcagaagctgctgagaaagcggcatctccacatgaaacgcctgcgccagaaaaatacaggacaccgataaatagaggcttgagccgtcacagttcagcgataaacctgacggaaccacaaaggagacgacccgcttcggacagccgtatttctccatccgatccatcagctgaggcagaatggtttctgtgcttgtcgtggagaaagcgatcaaaaacagatcccaaatcattttcagcacttcaaagtatttgattttaaagatgagccccacgatcggaaacagaacgaagagtatcaggaacagcccgaggaacacagtgccgatcagcttcagcatcggaagcaaaagcgcgattccgaattgcccgacggaggcggccatcagggcgagaacgccgatcggagcggtgaccatcaccatctgcgtcagcttgaacataatatttgccgtggattcgaagaaactcatgacaggtgcggaggctttgccgatgccggctgcggcaacaccgaataaaatcgcgaaaaaaatgacggcgagaagatcgtttttcgccataacgtcaatgatattaacggggataatatcaagaagcatttgtttcaggtcgactactttttccgtatagccggaaagctcgtgaatatcttttttagcaagatgagaaaggttaagtccgactcccggcttcagcacgttcgccaaaaacagaccgagcgccagaacaagcgtcgtaatcacttcgaaccaaataatcgttttgatgccgagactgcccatttttttcatactgccgctgccggcggctccgatgacaatggttgaaaacacgatcggcacgacaatcattttaatcaggcggataaatccgtctccgacgggccgcagcgccatcccgaaatccgggaagaaatggccgatcaatgctccgatggctaaagcgatcaaaatctggaatgcgataaattttttcaagcgaatcccccttttacttgcgcatttcatacgtaattcgtgaagcaggcggcaaccaccttcctatccgccataaatttgtcacattattgactgtgcgatagaaaggattgttttacattatgtaagcgcaatcatttaatatgacagaaagtcctcattgaaaaaaatgaaggagcataagaataaagaaagatttctgatgaaaatattaaaaattttgataattatcctcttataagtggtatatttgatatgatacggtcaactgcattctcatatatctgtgcatacacgattcaggcagagaaaacaggcagcttataaaagactgaaaatttaaacaattacaagaaaggtgtgcttttgttgaatcaactgattgaaagacgtaaggtcacagcaagaaaagaaaaaccggattccgcttcattgggatttggcaagtacttcacagattacatgtttgtcatggattacgaagaggagagagggtggcatgatccgagaatcaccccttatgaaccggtcaatcttgatccgtccgcatccgttttccattacgggcaggccgtatttgaagggctgaaggcttacaggtcagaagacggccgggtgttgatgttccgtcctgaccaaaatataaaacggctgaataaatcgttacggcggatgagcatgccgcctcttgacgagaagctggcgctggaagcattgatacaattggtggagctggagcaggaatggataccgatagaaaaaggaacctctttatatattcgtccgtttgtaattgcgactgagccttctttaggcgtccggccttcaaaacgttacaagttcatggttgttctgacgcctgtcggttcgtactacggcgatcagctgaaaccgatccgtatttatgtggaggatgagtatgtgcgtgccgtcaccggcggagtgggcgacgtcaaaacgtccggaaattatgcggccagcttacaggctcagcggaaagccgaagaactggggtatgatcaggtgctttggctcgacggggtggaaaagaaatatgccgaagaggtagggagtatgaatatctttttcatcataaacggagaggccgtaacgccggcattaaacggaagcattctcgggggcatcacacgcgcatctgtgatagagctgttaaaaagctggggcatccgcgtcagggaagaacagctcgccattgatgacatctatgaggctgcgatgagaggcgaggtgtcagaggtattcggtacgggaaccgcggccgtcatctcgccggtcggcgcgctgcacattcacggagaaacgattgaactgaataacggtttgatcggtgaagtgtcagaaaggctctatgaaacgattgccggcatccaagtcgggaaggtgcgggattcgttcagatgggtggttgaagtataaatgaaaaaagaacccttgcgctgcagggttcttttttcggttattgggattttacggcttgcacgcgggctctgcttttccggtttttcaagtaataagcgctgtagcaaacggccataaatgcaattccgcaataaagggcgatggcctggttcggatcaaaagcgatgccgatacaggaggcgaggcataggagaaaggccgctatcggtacggccggatatcccggtgtcctgtatttcaagtctgaaagctggtgcccttctgtaagaaaccgtcttcggaacaaaaattgcgatgcggcgatgctcatccacacagccactaccgcaaatcctgagacggagacgagaacaagatagactgtatccgctgcaaatacgcttgacaacaacgacagaatgccgccgatcatactgaagatcagagcgttaaaaggaatgcctttagaggtcagcctggcaaaggcgggatgaagctccccttctttagacagggaccacagcatacgtgatgacgcgtacagccctgaattggccgcagacagaagcgccgttaaaatgacgaaattcatcagatcggccgcataaggcacgccgattctgtcaaataccgtgacaaacgggctttcaatcacaccggcttccttgatagagatcatccctgacagcacaaaaatcgttccgataaagaaaagcgccagccgccagactgtagtcttaatggcgcgcggaacggttttttccggatcggcgctttcccccgcagcgattccgatcaattccgtccctgaaaaagcaaagtttactgaaagcatcgtcatcagtatcgggaaaaagccatttggaaaaaggctgccgccatccgtaaagttcgacagcataggtgcggcctcaccgcttttcatcgggacgatgccgaacatcgccgctccgcccaataaaataaacagtaagatggctaagactttaatacttgagaaccaaaactccgattcagcaaaaaatttcacggagaaggcgtttaataaaaagatgagaagagcgaataccgcactccacatccaaactgaagtatgcgggaaccaacgctgcatgaaaagcccggccgccgtgaattcagagcccagcgccaccgcccacgtcagccagtacagccatgcgaccgtaaagcccgtcgcgggcccgatataggtcttcgcataggtgtggaatgcgcccgtcaccggcatggccactgacagttcaccgaggcaaagcatgacaagatagacgatgcccgcgcccaaaaggtaagcgaaaatggtgcccgccggacccgcctgatgaatggtatacccagagcttaaaaacagccccgtcccgatcacacctccgagtgatagcataaagaggtgtctgcttttcatacttctctgaaaattcgtctcgttcttgttgttcattgttttccaactttctgcgagggccgtcctaataaaaaatctcatgccggcgaacggcacgagattccggcgaaccggctttttgaatagaatatacaaactattccgattagtcaagttgtttttaaggtcttggcccaatcggcaatggcctgaatgtccgcaggtttcgtccggcagcagcctccgatcaggctcacgccgttttcgtaccagctttgcgcgctttttccgaaatggttttcgcacgctgcgcctttccaggtttttgtcactgggtcatattgttcgccggagttcggataggcgataatcggtttggacgttgcccgtttgatttcttgtaccagctgcggaatatgttcgatcggtgtgcagttgatgccgatcgctgcgatttggctgcaggagccgagcagagccgcgcattcggaaataggcgtgccttcgctgatatgccgtccgtctttggcgctgaagctgatccatgcataagtgccggggaattcctccagcagccttgtgatcgcttttgcttctgacaggcacggaatggtctcgcaggccaaaagatcggcgccggattctatgagggctttcatccgggggcggtggaagctgatcagctcatcctccgtcagtccgtaatgcccgcgatattcggagccgtcagcgaggctcgcgccgtaaggtccgatagaagcggcgaccaaaggtttgggccggtgtaaacggttttcttcatgcgcccaaaattcatcgcgtgcttgcgcggcaagttcaacagatgtctgaatgagacgtatcgcatcggtttcagggatgccgcgcgctgcaaatccttcgattgtcgattgataactggcggtgatcgcgcaatcagcgccggcggcaaaatattctgcatgcacctgtttgatcagttccggcctctctaaaagaattttggccgaccacagatcgtcatgtaaatcacagcccatccgctcaagctcggttgccatcgcgccgtctatgatcatcaccgggtattcatttaatatttgtgtaaagggattcataggccttcctttctgactttactgaaaatatataaaaagggtaatggacgctattctctttgtcaatgaaccggcagaaaaaaggtgttcaggacgctgcccgaacaccttttgtttaggaaatgtgtttgcctttcgcacttttcgcgatgtctgaatactcccagcagtcgatcccgtcatcatcagggagcacatctctgtaaaagacggggtcctttccggctttcttttgccggacataatcgctcaaagcggcaaacgcttttttcgacagaaggaaaatcgcaattaagttcacgaccaccattaagcccatgaacaagtcagccatatcccacacaagctggactttggaaatacagccgaacagtaccattccgagcacacagatacggtaaatgaacagccattttttgttctggcttaaaaatccgatattggtttctccgtaataatagttgcccatcagagcgctgaagccgaacaaaagcattaagacggcaaggaaaccggacgcccacgcgccgacatgatcgctcaaggcggcctgagaaagcgcgatgccgctcagtcccggctggtgataagcgtctgaaaataaaatgataagcgccgtgcttgtacaaatgacgagcgtatccgtcaggacgccgaatgcctgaatgagcccctgtttcaccgggtggctcgtcgtagctgtcgccgccgcgttcggagcgcttcccatacccgcttcatttgagaaaatcccgcgtcttacaccttgcatcaaggccgcacctaaagcgccgcccgctgcctgatcaatgccgaacgcattttttacgattagcgacagaacgccgggcaattgggtgatgttcgtcagaatgacaaagaaagcgacaccgatatataaaacggccaaaacgactacgatgtattccgccattttcgcaattcgtttgacgccgccgaagattacgccgccgaaaaccaagattaaaataatgcccaatgtaagccggctggtgccgaatgcgttttgaaaggcgacgctgatcgtattggattgaacggaattaaaaacaaccccgaatgacagtgtgattaatacggcgaacagcgcgcccatccagcgtttcttcaggcccttttccatgtaataggccgggcccccgcggaatccgttttgatcttttactttataaatttgggccagcgtgctttcaacaaagcttgaagccgaaccgatgactgcgataatccacatccagaaaatagcgcccggaccgccgagtgagatcgcaatggcgattccggtaatattcccggttccgacacgcgccgccatactgatgcaaaatgcctgaaacggggaaatgctgttttttgtccgggcggccgcgccttccttcaaaacccggatcatttccttcagcatgcggacttgcagaccctttgatctgaacgtaaaaaacagtcccagagaaagaagcagtacgattaacagttttgaccataaaaaatcatttgccgagccgattacattttcaaggaattcctgcatccaatcacctcttggttcgtttgattaaaaaatactgagctcccactcctgtgcgatatgtttcagcagcatgccgccggtcaggctgttgccgtattcatcaatggccggaccgtaaatgccgatgccgcagccgttatgaaaaggctgttctcttctggcgcttgggggaaccaatgccataatgccgccggataccccgcttttggccgggacgccgacgaaagccgcatatttgcctgacgcattgtacatcccgcatgtcaacatcagggctttggcgagtttcgcgacatctttcggaatgacctgttcccgtcggatcggatggtagccgtcatgcgcaagtatcaatccgattaaagcgatgtcctcggttgtaccctccatggcgcactgctttaaatacacttcaagcgtttcttccacatccgcctcgagaaagttcgtttcttttaaatagtaggcgagcgctcggttccgatgcgcggtctgccattcagaacggaagacctcctcgtgaatgtgagggcgttttcctattaatttttcaaaaacggaaaagagatattctaatttatcatgcgccgtttcacccggaagcagcgaggcgacggtaatggcgccggcattgatcatcgggttgaagggcttcccgggtttatggatttcaagccggatgatagaattaaacgcatcacctgtcggctccacgtccacacgatccagcacgtaagaaatgcctctgttcatgcaggcggcaataaagctgatgacttttgagatgctctgcaatgtgaacgggacattccattcaccggcatgaatcattgagccatccggctctaatatgcaaatgcccagctgagagtcgttgatttctccaagggcgggtatataatttgcgctttttccattgacggaaaacggtcggtaatgctcgacccaatcttgtaaaagtgatgccagttcctctttttcaaggcgctctctgaccatatctttcataacattcctcctctattgcaagcctgtccgaagcggaacccggtcttggaaaacgttttcaaaaatagcgtgttccatgttaatgtataatgacatctacagaatcatacaaaatacgacaaaatcattcttaaaataagccgatagatttataaatcagccggagtgtcccgccattcgggtctaaagaaatttgcggactgtatcggtcttgttcaaaatagacagaagaaggaagtgattatgatcaggctcgactatttactgaaaaaagacggctatcttttcgcccttatgctgatcaccgtgccgctggcgggggaactgaaattttaccccctgaatgaggtatatcggatcagcttcggcgccccggcttttttcttttttctgctgctgcttcggcatgtgccggcagtattgtcagggctgttgacaggtgcagccgttgtggcattccggatcggcctggcgtgctggggaggagagcatgccggctttacggaggcttttttcagccaatatcccagtttctttttttactttacatatgcctgcttgttttatgtgctgaaggtcaggcttttttggaatcggccgctgatgatcgggtttctcggctttctcattgaaattgcgtccgatgccgttgaaatgacggttcagttttccggcggccggcagattatgatgccggacaagctggcggatatcgcagttatcgctgtttctcacacatttattgtgctgagttttttcaatgtgatgaagctgcacgaatctcaggtcagggaaaaacaaacgagaaagcagcatgagcacatgctgatgattgtgtctaacttatatgaagaaacgattcatttgaaaaaaacgctgaaaacgacagagcatgtgacgaaagaatcctatcagctgtatcgggaaatgagcgggaacgaccgggagctcgggagccgaatgctgcgcctcgcgggagaaattcatgaagtgaaaaaagacaatcagcgaatattcgccggcctgtcgaagctgatttccaatgagagattccgggattacatgaatgccgccgctctggtcggcatcgtcatccgaatcaatgaaaaatacgccgaatctttaggcaaggacattcaattccggagcgtgattgaaggagaacatcccgattatcacgtctttaccgtcctgtcgatcttaaataatctgaccgccaatgccgtcgaagccatgggagacaggggtgagatccgcctcgcactgcgcagggctgagggggagatggccgaatttcaggctgaagatgacggtcccggcattccggaaaaaatcggagaggtcgtttatgatcccgggtttacatccaaatacgatgaattcggcacaccttcaacgggcatcgggcttacttacgtgaaggaaatcgtaactgaacttgacggagacatttcctttcacaacaagccaaaaggcgtcatatttacgattaagctgccggtaaagcatttgattgcagaaaggatgaactcataatatgcggttttttatagctgatgatgaccgggcgatccgttccattttaaaacagatgatcgaggacgaggacttaggcgaagtcgtcggtgaggcagaggacggaagccagattgaagggcattatctccattttaagcaagtcgatattttattaattgatctgctgatgccgggtcgggacgggattgagacaatccggcatcttcaggggtcgtacaacggaaaagcggtgatgatatcgcaggtggaggcaaaggaaatggtgggagaagcttattctctcggcatcgaatactttatccacaaaccgatcaacaaaatcgagatcgtcaccgttttgcgaaaagtaaaagagcggattgaactggaaacctcgatcggcgacatccaacactcgttaagccgccttattcagcggaatgagccgaaaaaaagcgggcctggggggatgcacgagaaatcaatcaaagaaacaggaaaatttcttttatcggaattaggcatcgtgggagaaagcggggcgcatgacctcatggccgtccttcactatttatttgaggatgaacaggcggaaagaaacatcccgtctttaaagcagatgtttacaaacgtcgccatccggaagctggggcctgcggcggcacaagccgaggttaacagggaaatcaaagcctcggaacagcggatcagaagggccgtcattcattcgttaaaccatttcgcttcattgggcacaactgatttttcaaaccccaaatttgaatattacgcctcgaaattctttgatttccctgccgtcagcaagagaatgaaagaaatgcaggctaaggaaaccgtgccgctttctccggttaaagtgaatatgaaaaaattcattcacgtcttctttttagaggcgaaagatttacgcgaaggatcaaaatttgtcagcggaggcagccggtgagctggctttggaaaagatggcaaacgtggataaatgacagttcgtactggcctgatttttccgcgctgatccatggcttgcaccctccgcatatttttgcaaacgaaaatcagcatgtgacagaatggcaggccgcttaccctgtggaaacggcgaagttcgcgcttcagacggggcaagaggagcatatggaaatggcgcgggacatgctcggcctgtccgatccgaaaggttattgacttccgccggatgacagcgtatgatacattttaaaataaaagaacggatgaataatgctgaggaagagtaagtacgcatcagcgcgcggggttcagagagtcggtggcagctgtgaaccgatccccgtccggtgccgaatgggcttctgaattgctgcgctgaaatgacagtaggcggtgccgggattctttccccgttatcaagaaaggagtattgaaaccgtgtgtttctgtactttttgagagaatggcttttcagccgttaataaaggtggcaccgcgaaaacctcgtcctttgatggacggggtttttttgtgttgttaaggaggtgatggccatggaaagtgactggagacggacagacaatcaaaaaaggagggatattcatggtgatcgcaaccgacgaccttgagctcacgtgtccgcattgtgaaggaaccggccaggagaaagaagggacgccctgtccgaagtgcggcgcgaagggcgtcatattgaccgctcaaggaaacacgctgctgcattttatcagaaagcatattgatcagtgaaatcaaacgaaaaaggccgttatccggccttcaggctgtcgagaaaatctcgacagcctttatttttcccttaaaatatccattcccctgtcataaaataaaagaaagacagaaaaaatggctttctcatgttccacacaagaaatttttctcaaaacacagccgaattcgttctgtttgaccaactcgtcgaagaggatcaccttcttcgaaaaattgataaatacatagacttctctttcatcgtggaaaaggtcaaaatttactgcagcctcacttgatccgctgatcttattcaaaatgatgttgaagatagccacatacccagccaagcaaggctaggcatgtaggagtgctttttctgcacctgaaatcaaatgaatatgtaaagaaacagcacgaaacaaaaaagcttgcagaaaaaacatcattttctctacaagctgctttttcattcttcaaaataaggattcacatggatgagcacttcttcaacatctgaaaagtgtcttttgatttcatttcggatttcgcgggcaatatcgtgtccctgcttaatcgtcaaatcatgatccaaagataaccggacatcaagcaatttatagtggccatgttctcttgctcggattttatcgagccgtttgacttgagggcaatgcaaaataaccgctttatattcctctatcagttcgggatcaacacttttttccatgagaacgtcaacagacggcctgattaattccattgaaatcttaaaaatgaggtacgccacgatgacactggcaattgcatctgcgtacaacagataggaccatccgcgggtgttcccgataatcgccaataggacgccgataaaagcggcaagagaggcaacgatatcgcctttatgatcgtatgcaatcgctataatcgctttactgttccattttttcccttgtttgatcgaataacgatataagatctgcttagccgcgtaggatatcagagccgcaaacaatgcgctgtattgcgggatgcttgggccctcaacaaaggacgaaatcgcttctattagaatatacacggaaacgagcactaatattattcctacaatcgcttcgctgatgacctcagctttgccatgcccgaaaggatggtcttgatcgggcggcttattagaaatgccgatgacggccaggacagcaattgaagccgcgacatccgctgcagaatgtataccgtcggcaaaaactgcttcactatcgcctatcagtccaaaaaagatctttcctgccattaagatcagattggctatcaatgcaatcaaagcaacttttttgcttatttgttctctttcacttgtcattttttcctcctataaaactgcacaaaaaaataggggcgcttttgattcgcactccgtatcctttctcgtgtaatcactctgcttatcgtaccaattcagtttcgagtgggtctatagcaaggttgtttcctgtttcctaataaataaggtgacagaaaaaaagttggagcagggctaaacagtacacagacaaaatggcgctgaatttaaaaatgaactgttgacatttgagtatttatcttttattattatctcgaattcaagattttttaattcaagataatttaattagagtgcaggataagaacctgccgatcgtttgattcacgaaaagatcagtgaagagaacgtttcgttttttaatcatacgttatttgattttttatactataatatctcgaattcgagataaaaggggtacgagagaaatggctgaatttgtacagctagtgaatgaaagaagatctgcaagcaactttcttccagaacatccaatcacaagagatgagctcaacgaaatgtttgaattggttgcgttggctccatcagcttttaatttgcagcatacaaaatatgtgacggttcttgacccgaatgtaaaagaaaagctgaagcaggccgcaaacggacaatataaagtgtttagctcatcagcggttcttttggttttaggggataagcaggcatatcagcaagcggctgacatctatgaaggattgaagctgcttggggtattaaataaacaagagtatgatcacatggttcaagacaccgtttcgttttatgaaaacaagggagaaccatttaagagagatgaggcgataagaaatgcttcactttctgcgatgatgtttatgctgagtgctaaggaaaaaggctgggacacctgtccgatgatagggtttgatactgaagccgtgaaacagattttgaagatagatgatcaatttgaagttgtcatgatgattacaatcggtaaagaaaaaatagaaagcagaaggccgcgcggctaccgaaagcctgtgaatgagtttgtggagtatatttaaatatttgtaaaggagcggataaaaatggctaaaaaaacgatgggaatccatcatattacagcaattgtcggtcaccctcaagagaatgctgatttctacgctggagtgctggggctgcgattggtcaagcaaacggtcaattttgatgatccgggtacgtatcacctttattttggggatgaaggcgggaagccgggaacaatcatcacattctttccgtgggcggacgcccgtcaaggcatcattggagacggacaggttggcgtgacatcttacgtcgtgccgagaggtgctatggcattttgggaaaagagacttgaaaagttcaacgtgccatacacaaaaatcgagcgttttggagaacaatatatagaatttgatgacccgcatggcctgcatttagaaatcgtggaaagagaagcagggaaggtcaatacgtggactttcggagatgtgaccccagatgttgccattaaaggctttggcggtgcaaccttgttatcagcacagccagaaaaaacaggtgaattgctggaaaacatcatggggcttgagcgagtcggcaaagaaggagacttcgttcgttatcgttctgccggtgatatcggaaatgtgattgatcttaaattaacgcctatcggccgcggacaaatgggtgtcggcacggtccatcacatcgcttggcgggctcaggatgacgaagatcaattagattggcaaagattcattgctgcgaacggatatggtgtgactcctgttcaggatagaaactattttaatgcggtttacttcagagaacacggggaaatcttatttgagatcgcaactgatccgccgggctttgcccatgatgagtcacaagaaacaatgggcggaaaattgatgctccctgagcagtatgaaccgcaccgggctcatattgaacaagggctgctgccgtttgaagtgagagaattagattgattgatagatgaacgtgaagcatgaagaaaaataataagtcatacatttaacagatgtttgctggaagcgactgttggtaaacaagctgccttgcagcacatcatataatatgaaaaataaggagagataaaaatggaagatgcaggactattacttattcgaatcatgattggtgtggtgtttctgttttatggatcacaaaaattattcggctggtttggcggatacgggattaaaggaaccggacaatggttcgagtcaattggagttaaaccaggcaatgccgcggccgctttatcaggtctcggggaactcgcaagcggaattttatttattttaggtgtattcctcccgcttggagctgctattataacgatcattatgttaggtgccattgtaaaagttcacggagcgaaagggtttgcgaacggtgccggcggttttgaatataacttggtgctgattgcagtctccatcggagttgcactcatcggttcaggggcgtacgctttgcatttttaatataagtatctaagaacagttactgaaaagcggtaactgttcttttatttttcaagcacaacgttaaggaatagcaaaaaagcggatatgatcaatataaatgtgtatagtgaatgtacgagtattgatgagcttggtcatgaaagactagccgatttgaaggaggattttgatgaaagagctgacagacttacattcgttagattctatcgagaattttattaagcagcatcaattcagttttatctacatttcaagacccacctgtacagtatgtcacgctgttctgccgcagctcagaaaagtattggatcagtttccgaatatcaaattggggcataccaacgctgacgaggtagaagaggttgccggcagattttcagtcttcactgtccccgtgcttcttttgttcattgatgggactgagtttctgagagaagcccgccttgttcattttgaacagctcgaagaaaggctgataagggtttatcagttatatcaagatgtataaaatgtttatactttacaaataaaaagccccctttaaggggctcaggctgtcgagaaaatctcgacagcctttattttttccttaaaatatccattcccctgtcataaaataaaagaaagtcagaaaaggacggtgtctttctcatgttccgcacaagaaacgcttctcaaaacacagccgaattcgttctgcttgaccaactcgtcaaagaggatcaccttcttcgaaatattgataaatacatagacttctctttcatcgttgaaaaggtcaaaccttactgcagcgctcacttgatccgctgatcttattcaaaatgatgaagaaggctgccacatacccagccaagcaaggctgggcaagtgggagtgctttttctgcacctgaaatcaaatgaatatataaagaaacagcacaaaacaaaaaagcttgcagaaaaaacatcattttttctacaagctgaaggccgttatccggccttttttacgttattcggaccggggttctaaaaaacgggacccgcccaagtcttttctcatcagataaatatggaaaaaatattctccgacagcgatgatgacggcggaaataagagcggcaaacgccagtcttcctccggaaatgcccatggacagcggcattcccatcagccagacaacaagaaacgcgattccgaaatcagcggacgccgccgtgatattattccatctcggaagcacgtacaggtcgcccgtaaagtaggaaacggcccccagcacaatggtcatcagcagcacgtcgccgaatgtaaagcgaaaacctaagccgagtatcagatacagaataatgatggtcataatgcctttaatggcaagcgctttaatgtgttccatgcgaattcctccttatggaaatcatgttagtatgtttcctcataacgagaaatataaacccttttttcgtgaacatttgttttctggcttttggctgtcatcactgggccgctgctgaatatgatgaaaggagaaaatacgggaggtgtcatgatggcagtcgtaaaagcgtcgagcgcagatgtcaatctaatggcaaggctgctcagggcggaagcggaaggcgaagggaagcagggaatgcttttggtcggcaatgtgggaatcaatagggtgcgggcgaattgttctgattttaaaggcctgcgcaccatcaggcagatggtgtttcagccgcacgcgtttgaagcggtgactcacggatacttttaccagagaccgcgtgaatccgagcggaggcttgcccgcaggaacattaacggagaacggttttggccggctaaattcagcctgtggtattttaagccgccgggcaactgcccgcagacttggtatggccagccgtttgtcgccagattcagatcccactgcttctatcagccgacaggtgagacgtgcgaaaacgtgtacaatacattttaatcccggacgcaccgttcttagaatgaacggtgttttttaattttttgtgaagaaaaataggaaaaaagtgcgcttgacggatgacaagccaaaaagaaacagagggggttttctcccggcggggcaaggtttgtcgaaacaatgtgaaaaatgtctcccgccgtccatttttcagccttacaaacccttcatacttcttcatagcggtttaacatttcttttttataataagggcgatcaatgagacgaaaggggaactgacatgacacatgacggccgtttagatgaatggatcaaggaattggagaacaaaagctttcagaacaatacatttgaccgccgcgcatttatacagggcgccgggaaaatcgccggtctttccctcgggttagcgatcgcgcaatccatcggcgcgtttgaagtgaatgccgctccgaaattttcaaactatccgttcaccctcggcgtagcctccggcgacccgctgtctgacagcgtcattctctggacgcgtcttgcccctgacccgctgaatgggggcggcatgccgaagcaggccgtgccggtaaaatgggaaatcgccgctgatgaacatttccgtcacatcgtcaaacgcggaacggaaatggccaagccgaatctcggacactccgtccatgtcgaggcggacgggctcaagcccaataaagtgtactattaccggtttaaaagcgggcatgagctcagtcccgtcggccggacgaaaacgctgcccgctcccggcgctgacgtatccgccatgacgtttgcatttgcctcatgccagcagtatgaacacggctattatacggcgtataaacatatggcgaaggaaaagcttgatctcgtgttccatctcggagattacatttatgaatacggaccgaacgaatatgtgtcaaaaacgggaaatgtcaggacgcacagcagcgctgaagtgtatacactgtcagattaccgcaaccgtcatgcccaataccgctctgatgccaatctgaaagccgcccacgccgcatttccgtgggtcgtgacgtgggacgatcatgaggtggaaaacaattatgccaatattatccctgaaaaaggccaatccgttgaagcgtttgtgctcaggagggccgcagcttaccaggcttattatgaacacatgccgctcaggcgcatgtcattgccgaacggtcctgatatgcggctgtacaggcaattttcttatggcaatttggcatcgttcaatgtgcttgatacaagacagtacagagatgatcaggccaacggcgacgggaataagccgccttctgatgagtggagagacccgaagcgcacattgatggggacagaacaggagcaatggctcttcggaaatttagccgcgtcaaaagcgaagtggaatgtgctggcgcagcaaatctttttcgcgcaatggaatttcggaacaaccgccaatccgatatacagcatggattcatgggacggctacccggctcagcgggagcgggtcatcaattttataaaaagcaaaaacctgaacaatgtcatcgtgctgacgggtgatgttcacgcaagctgggcgtcaaacctgcataccgattttaatcaaacgaattcaaagattttcggagccgaattcgtcgggacttccattacatctggaggaaacggggcggataaacgggccgatacggatcaaatcttaaatcaaaacccgcacattaagtttttcaacgattaccgcggctatgtccgctgtacggtgacccctgcccaatggagagcggattacagagtggtgccgtacgtgacggagccgggggctgaggtatccacgcgggcttcattcatttatcagaaagaccagacggggattcggaaggtctctcaagctgcggttgcaggcggtttaaagcagtcaaacgaggtggaagaggatcgtttcttcgcccataacaatgcgcatgaaaagcaaatgagaaagaaacgggccaaaatctcacaataaggaggcacactcatgttttcaaatatcggcattcccgggttgatcctgatcttcgtcatcgctctcatcattttcggaccttcaaagcttccggaaatcggccgtgccgccggccgcacgctgcttgaatttaaaagcgccgcaaaaacattggtctcaaatgaagagccggacaagcagacagctgagaaagacaaaacggcaggctgaatcctgacatgggggcagacgaatccgcttctgcctctttctctataaggaggatgtacgattggataaaaaagaaacccacttgatcgggcatttagaggaagtccggcagcgtctcattaaaaccgttatcgcctttctcgtattttttatcggcgcctgctggtttgtgcaggatatttatgactggctgatcaaggatttggatggcaggctggccgttttagggccgagcgagattttatgggtgtatatgatgattgcgggaatatgcgcccttacggcaacgattccggttgccgcttttcagctctggcgttttacggcgccggctttgaccccgtttgaacgccgcgccgctttgctttacattccggggctttcggttttgtttattatcggaatttccttcgggtattttgtgctgtttccgattgtgctcggatttttaacacaattatccgccggccattttgacatggtatttacggcggacaagtattttacctttatgctgaatcttacattgccgttcggatttttgtttgaaatgcctctggccgtcatgtttctgacacggctcggaatcgtgaatccaacccggctggcaaaggcgcggaagctttcgtattttgtgctgatcgtcgtctcggtgctgattacgcctccggattttatgtctgactttctcgtcatgattccgctgctcgtcctctatgaaatcagtgtgacgctgtcccgcattgtttaccggaagaaatgggccgaggcgccgtctgcagcttagtgaagttcgcctccgccggtctcaatatcgtcctcatgcgccgcggcggtcaccgcggcgattttgagcgcttttgtcacgagatccaggcttaggctcggcgcagacttctgcaaggtttgctccggaatgtacgggatgtgtataaacccgccgcggatgtgcggatggcggcaggcgatttcatccatcaggccgtaaaagaggtgattgcatacaaacgtccccgccgtgtaggatacagccgcgggaatgccttcctttttgatttcctcaacgatccgtttgatcggaaggccggtccaataggccgcgggaccgttttgagaaatgttttccccgacaggctggtttccttcgttatccggtatacgcgcctcattgagattgatcgcgacccgttccggcgtgatctgcattctgccgcctgcctgtcctacacagatgataatgtcaggctgatgctttttgatcgcctcgcgcagcacagcaagggacttataaaaaacggtgggcacttgttcagatacgatagaggcggggccctcagcggcaccgtccagccgtttgaccgcttcccatgaaggattgaccgtttccccgccgaaggggtcaaagcctgtcagcaatacttttttctccatataaaaccctccttttctttttaccatactctataatggacatatattcctgccgaagggggaaacacgtcttgaattcgcctctggtgcaataccgatctttatttccggcgctccgcacacatacgatgctcgccagctgctctcaaagcgctcttgccctgccggtttcaaaagcgatcaatgactatcaggaaagcctgcttcaggatggcggaaactgggaagaagccattggacgaacggagcaggcaaggtgtgaatttgcgaaattgatcggcgcccatcctgaagaaattgccgttttaccttcagtaacggctgctgtctctgccgtcgtttccgctttaccggattgccgaaagaaacaggcggtgtatacggaattggattttccggcgatcgcccacattttgaaggcacagactgagatggagctttcagtcgtgccgtctgaaaatggaatgatcccgttagagcggtatgagacgtacatatcggaacagacgcttttcacctgtgtgccccatgtgtcatatacgtccggttttgtccaggatatgaagcgcattgccgagatatccgcaaagaagggatcgcttctttttgtcgatgcttatcaatcggcggggcacatcccgattgatgtaaaagaatggggagttgatatgctggccgcgggtgcgagaaagtatatgctcggcataccgggaacggcgtttctttatgtcaaaaaggaacttgccgaacggctgaagccgaaagtcaccgggtggttcgggcagcagcgggcgtcgatgctggatttaacccgtttttcttatgcggacggagccaaacgctttgagaccggaaccccggcatttatcagcatatatgcggcacaggcggctttatctctagtaaacgatgccggcacagaccgcattcaccaagaagtaaaaaaactcagcgcatttgcgtatgaatacgcttctgaaaaaggactgaatctcacagggccgccgtctgccgatgacagacccggcatgatttccatacgggatgaaaaagcggcggaaacggctgcgctgttgaggcggaaaaacatcgtatgcgcacccagcggacaaatcatccggctggcgcctcatttctataacacggccgatgatctgatctatgcgattgatgaactggctgaagcgcgcggtatataaaaaaacagcagactcactgggagcctgctgttttcttatgagtgattcactttgacccgtttcataaagaaagcgctgatcaagccgataacggcgacaatcattgcgaagataaaggcgtgctggacgcccgcaatcagcgcgtgagagtatgcggaaggatcattcgggtttttcgcggtgctcatataatccttctggccggcagccatgatgctgaccgccaccgcagtgccgattgcgccggccatctgctggagcgtattcataatggccgttccgtccggataaaattccggcggcagctggtttaagccattcgtttgcgccggcatcatgatcatggaaatgccgatcatcaggcatgtatgaagcgcgacaatcagaagtgccgttgaagcggcgttaatgtttgagaaaaacgaaagcacagttgccgtgatgacaaatccgggaatgacaagccacttcggcccgtatttatcaaacagacgccccgtcaccggagacataaagccgtttaaaataccgcccggcagcaggatgagcccggacgtaaacgccgtcagcatcagtccgctttgtaaatacataggtaatagaagcattgtcgataagataaccatcatacagataaatacaatcacgacaccgagaacaaacatcggatagcggaaagcgcgcagattcatcatcggctgcttcattgtcagctgcctgatggaaaataagatgagcgcgatcgcaccgacagtgagcgaaccgataaccgtcgggcttgaccagccgtctgatccttcgcccgcattgctgaatccgaatacgatgccgccgaacccgatcgtagacagaataatggaaagcacgtcaattttcggttttgtaatgtcagacacgttctgcatgtaggcgatgccgaataaaagagccaacacaagaaacggcagggaaatccagaaaatccaatgccagttcaaatgctctaacacaagccctgaaaatgtcggaccgatcgcaggagcgaacatgatgacaagcccgatcgtccccatcgccgctccgcgcttatgcggcgggaagatgacgaggattgtattaaacatcagcggcagcaacagcccggttcctaaagcctgcacgattcttgccgccaaaagaaacggaaagctcggcgcaagcgctgcaatcagcgtaccgataatggaaaaagcaagtgaaacgataaacagctgtcttgtcgtaaaccattgcaaaagcagacccgataccgggacaagtataccgagaacgagcagatagcccgtcgtcagccactggacggtcgcaggagtgatatgtaactccttcatcaggtcagtcagggcgatattcagcgccgtttcactgaacatgccgataaaccctgccgtcagtaaagaaatcatgatcggcatgactttatattgtttggaaggctgagcattttccaaaatcattctcctctctttctatacgtacaatgtctctcgtattttatgtcttcagcaggttcgggatttgtttagaaatatggaggatcggcattttgtcttttttggctaaggacacaatgatgccgccttctatcatggcatttaaaacagtgctgatttccgccgctctctcatcagaaaaaccggctgatctcaatttgcccgcgaacagattctcccattcctgataagcgcattgacaggcctgccggagcttttcgctctttaaagccgtctcggcagccagtaaaccgacaggaaacccttcaaagttctccggacatgtgaattggcttgataagtcctgtaaaaacgcttgaatgctttccgcaggatcaggatgggcatcaaggctttcttttattttcatacggatataatggctcatttcattgacagcctcaatggcgagctgctctttgccgtccggaaaatgatagtaaagagaacctttcggcgcaccgctttctttaataatctgattcagccccgtgccgtaatacccctgaagctgaaacagcctggttgccgcggcgaggattttttcacgagaatctccatagctcataatgttcccaccttactgatttttgacaaatttaaaatatagtgactggtctattatcttgatttcgcatgacggtgtcaaggttttttaacggttattttcttcggaagaatgcctgacaagcgtgttgaccgatgagaggaaaatcttcataaataaagaaaaggagagaaaagaatgaaaaaacaattcatgcccttcattacatttatcacggctctgctattcctcgcggccggctgctcccaatctcctcaaacgaaagaaacaccgccccagatggcagccgcagcctctgcgaaaaaagacggacttccgaatattaaaattcttgccaccggcggcacaattgcaggcgctgctccttcaaagacgtccgctacggagtacacggcgggggcaatcggagttgatgccctgattcaggccgttccggagataaaagagatcgcgcatgtgagcggagaacaggttgtgaatatcggcagccagaatatgaataacgagacactgctgaaacttgcaaaacgggtaaacaagctgctcaagtctgatgatacagacggcattgtcattacacatggaacagacacacttgaggaaaccgcctactttctcaatctgacggtcaaaagtgacaagcccgttgttgtcgccgggtcaatgaggccgtccacggcgatcggagcggacgggccgtccaacttatatagcgcggtaaaaacagcggctgcgcctgatgcgaaaggcaagggggcgcttgtcgtattaaatgacagaatcgcttcggcgcgttatgtgacaaaaaccaatacaaccgcggccgacacatttaaatcggaagaaatgggttatatcggaacaattgctgatgacgtctattttaataacgtcatcacccgaaagcatacgaaggatacagatttccagatagataaactcgataaactgccgcaggtcgatattatatacggctatcaaaatgacggaagctatctctttgaagccgccgtaaaatcaggagcgcaaggcattatttttgcaggctcgggaaacggctcaatgtctgatgcggcgcaaaaaggcgccgtaaagtcggtcaaaagcgggctggcggtcgtccgctccacaaggacgggaaacggaacggtaacacctaatcgagagtatgaaaaagaccatttgacagcttcaaactctctcaaccctcaaaaagcgcggattcttctgatgcttgcgctgacaaaaacgcatgaccctaagcggattcaaacctatttcaatgagtactaggagaagagaaccgggtgttctctccttttttggtctgccgtattaaagcataagcgtgctttcgggataggggcgtctttctcatttttccgctctttttaaattgttgaaaacagtaaaaaatacactattttttccttttctcctctaatagaatgaaaactgcaaaaatattacatagcaggaggaaagttcatgaaacaaataaaaaacaaaattctagtcatccttacagtctgtatgctgtccgtcatttccgtatttgccttccagccgaccgtatcgaaagcctcctcagggcataaccctgttgtcatggtccacggaatcggcggggcgtcctttaacttcgcgggaatcaaaacatacttggcatcccaaggctggtcaagaaaagagatgtacgccattgatttcttagacaaaaccggaaacaacagacataatgcgccgagactgtccaattacgtgaaaaaagtgctcagcgaaacaggtgcgaaaaaagtcgatatcgtcgcgcacagcatgggcggagccaacacgctctattacattaaaaatcttgacggcggagacaaaatcgcaaacgtcgtcacactcggcggagcgaacggccttgtgaccaaccgggcgcttccggggactgatccgaaccaaaagattttatatacatcgatttacagctcagcggacttaatcgtcctgaacccgctgtcacggctgatcggcgggaaaaacgtgcagattcacggtgtcggacacatcggacttttgatgaacagccaagtaaacgggctgattaaagaaggtctgaacggcggcggacaaaatacaaattaatagtttcaaagccccggagaatgagaatatcccggggtcttttttttcttccatattcttttttcgccgtaaaccaagccctctgaagttatttttgttaaaataataaagttatatcagaattcggagggtttattgtgggaaaagtgaaaagaaatgccccttgcccatgcggcagcgggaagaaatataaaaaatgctgcggaagcaaagaagctgccattccggcagacatcgcggcaaaagaagcgaaacagattcaggaaagcctaatggagtacgcctttacagcacatagagacggcatatcatcatttattaaccagcacgcgttcattacggagctggacagacagacaaaagacatcggagtcttcaacctcggcatctggggaattttcttccgtccgctggcaggcggcaagacgatttttgaagaatatcttcagaaaaaagccggcggcatcaaccgcccgaaaacacgggaaatcgttgaatcatggaaaagcatgacacctgccgttatggttcttgaagatgtgaaagaaggaatgattcactttgaagatgtgatgacgaaaaaacaattcaaagtggaaatggacgtcagccagcaggatcttccgccggcgggaagcctgattctcggctatccgatccacgaagcggaaaaagccgagttcttcatgcaatttacgatcttccctgtgaagcgggccgaagctttgatcagcaaagtgaaaaaggcggcggccccggcccttgcggaaggaaaatcgcctgagcgctttatgcaggaaaacttcgacactgtgctggccgctcttttaggatcggcggaagagcctgagcaggctgctgaagaaaaacagacagagtgggcgaacgacatggagaaggaaacggcggacgctattgaaaaaggcctgagcggggatgaatacccggctgagctggttccggccgtaattgatctgtggaaaacgttctgtgtcaaaaaaacaccgacgatcagaaagcctgaagctttcgcagcggcggtcgaatattacgtgaacagcatttctctgaacggcgcgtccgtttctcaagcgaagctggcgaagaagtacggcgtcagcgcctcaacgatttccagccgctataaggaaatcgagggtgctctcacggatgaagccgaacgcttcgccgcagctctgacatcttaatacacagcaaaaaaaccttgaagggcaaacgcttttcaaggttttttctatagataggctctcaggcaggataattcttaccgtctatctaatactaaacagagcgataaaaggaagggagcctgagccatggatgagacacgtacgctgggcaggacgggtttacgggtaaagcgtatcggctttggcgctaatgcggtcggaggacataatctgtttccgaatcttaatgatgaaacgggaaaagaactcatccgcacagcgttggacggcggcgtcaattttattgatacggcgtttatatacggtttgggacgttccgaagagttaatcggtgaagttgtcgcagagcgcggcgtgcgggacagtctcgtgattgcgtcaaaaggcgcgcataaagaagtcaacggacaaatcgagctggacaacagccgtgaatttctccggagtgaggcggaaaacagacgtgatcgatttgtattacgtccacttccctgacggcaaaacaccgctctccgaagtggcgggcacactaaaagaactgaaggacgaagggaaaatcagagcaatcggcgcgtccaatctcagcttccggcaactgcaggagtttaacgccgacggctatttagaggtttttcaatcggaatattcactgattcagcgtgaggcggagcatgatctgctgccttattgtgaaaagaacggcatttcctttattccttattttccgcttgcttccggcttgctgacgggaaagtttacaaaagacacagtctttgaggacagccgaaagaacaggccgccgtttcagggagaagcttttcgccaaaatctggagcgagtggataagcttcgggccgttgcggaggaaaaaggggagcagacagcgcatatcgcactcgcatggcttctgtcgcagccggcggtggatgcgatcattcccggagccaaacgccctgaccagctgaaacacaatctggacgcgcttcatgtgcagttaaccgaggatgaggttcaatatatcagtgacatctttaagtgaaaataaaaaaaggaaatagcctgcgctatttcctttcttgttgtcaggacgttttcaaaaacgcttctgtcaatccttccagatcggcgtctgtatccagataccactggccgcgggcgtttttcttcatctcgatttctcttgtaacggaagaagaagccggtttcaggcgcataaactcttccggatagacagaaagcaggtggctgacaatttcgttttcatcagcatcggggtgctttccggcatagtcttgcacgcggtcttgcagctggcccgcaagcggagacatatcaagcggcgtcacttttgcttcaaggacggcttttttgcctgacatggatttggtatgcaccttgagctctgtgttatcccgcagcgctgatgacatggcgtcaataatagcggaaatggcttttggatccgcctgttcttgtgaaatgcctgctgaggtgataaagctggctttcgccgattcctgatatgcggcggccgtcattttttcatttaccccggtcaggcgggtgaaatctttattgtgtttgccgtacagcatcacatcaatgtaggcggataatgcgtccgccgggtcaggtactgcttttgaggctgtgcctttgactttcagtttataagataaaggcttcgcgtcttttgcctgcggctgatataccaattcatatgatttgccttcgtcagccgtgaagtacagattgcccgtcactgtcttaccagcatgaagcgtgccgctctgcatcaagtcttccttatcggtcttggctgttttcgcgtcatcctgataaagcgagaagtcgctgcttttgacggtaagcgggtctttgcccgtatttttgacggtgaccgttactttcagcgcggccggatgttcagtatcgtctgaagcggcccacgccgtctcttttattttcactttcgccgtgctgctttcctggccgctgctcgtttcgctgctgcacgcggcggtaaatgccgtgagaagcagaatgaaaaacacggcgctcatttttttgatggacatctggtttaccccctgttgttaatgattaattcgatagtcatgaagatggacaggttaattatactagttttgtataaaagagtcttggtaatcatcaatctttttggaagaaaaggaagtgttatgatgaaaaaagaagagttgaaacagctggctctccgaatcggaaacgtacctgcccgctacgagagtaatgtggaagaataccaggaagatgaggttctgttttggtgggaagataagaatgatccggaagccggcatcatggtcgaattagaccgggacggaaaactgaaatacttatcccgtccggctttccggactgatctgccgcctctttcggaatcggacatagaaaaacggatgcgggcgtttttagaaacccatcgtccgggggcattggctgagtttgaattggaaacaatcggctccgcaaatgatggcgatgtgagatattcctatgttcagatggctgacggtctgccgcttccgctgaccgggttttacgtcgacctctctttgacaggggaagtaaccggtttttcttaccatgggaaggccgatgatcttgtaaggcccgggacaattgcggacaagcgggaagcattggctcactttgtcaaacatatagaagcagagctgttgttcaccgtcctgcatcagtccgtctatatgcagggggatgacaagcctcatctcgtctatgaaatcgtgtctccgacgcggccgatatcggccg

SEQ ID NO: 57 - DNA, 45195 bp, Bacillus amyloliquefaciens
aggacgccgccaagctatgttacggtaaaggcagctcattatgagctgccttttttgtttttgaataaaaacaaaacaaacaccgaaatacggaaacacccatatactaattgcaaacttcaaaaaggtccaaattgtgtatacaatcaacagcttaagggaaggctattcatacggaggtgggcaaaatgaatgaaacgtccagccatgaagaaacatgtattgtgtgtgaaaccaaaaaaagcaggggaatccatatttatacgaaatttatatgtttagagtgtgagaagaaagtagtttccactccgacctctgatccaaattatgaatttttcgttcgtaaactgaaaagccttcatacaccgacgttatattcttaaccctgaaaagggtcttttttttgcctgaaatcagaggagtttttacactttttataaaagaactgatacgataagaagaggaacttgtttagacatggaatgtaatagataatactgataaaagtgaataaataggagtcgatcaagtatgaaaccgtttattcaatatatgaaatggacgctttgcggcagcacagtttttgtattagcggggataaccttctttacgatagggcatcagccttttctgtattcgcttttatacggggcggccggcggagccgctgtcagtgcggccggcctgtggaatgcgaagcgtctctttttgaaaaaacaccggctgacaagaaaagaatatgcttatatcaaggaaaatcttgaggaagcaaagggtaaaatcatccgattacgcagggcgctttttcgctctaaaagtatacaaatgctgaagcagaatgcagagatactgcggataacccgacgaatatatctgctcacaaagcaagagccgaagcgtttttatcaggcagagcgtttctattatcaaacgcttgattctgttgtggaactgacggaaaagtatgctctgctctcctcacagccgcgaaaaaataaagatttatcaatgtccttgagtgagacgaggatgactctagcagagctttccagaaggctggaagaggatcttcatgaactgatgaaggaggacatcgacgacctgcactttgaattagatatggcaaagcattcactgagaaaataagaaaggaagaaggaaatggccaaagaccgttccgacgacagcatggacgcccaaaatgaccagacccctctaaagcttgcagatacgctgccggaagaaaaaagggaagcggcacttcggctcgctgaaaaactggaccctgagaacatgcaaagcattgttctgtttggttcacaggcgcaggcgaatcttctggaattttcccacacgatgatagagcacgtgcaaagaaaagatgcaggagagatgggacagatactggctgatttgatgctgaagcttgaccaggtcaactctgatgatctgcagatgaagaacaaagggtttttcgcccggctgtttaaaagggtgtccggttctgtacaggaagtgctttcgaaatatcaaaagacaagtgtgcagattgaccgtatcagcagaaggctggaacattctaaaaatgtgctgttgggtgacaataaattgttagatcagctgtacgcccaaaataaacaatacttttctgatttaactatgtatatagcagcgggggaattaaaattagatgagctgaaaacaaagctgatacccgaagcggcaagaaaagccgaattacaagaacacaatcaaatggccgcgcagggagtgaatgatcttcgccagtttgccgaccgtctggataagagggtgcatgatctgctgctgagcaggcagattacgcttcagagtgcgccgcaaatccgcctgattcaaaacacgaatcaggcactggcagagaaaattcagtcctccattgttacggctattcctttatggaagaatcaagtcgccatcgcgctgacgcttatgaggcagcggagtgcggcagatgtgcagcagaaggcggcggatacgacaaatcaattgctgctgaaaaacgccgaacttctgaaaacaagtacagtcgagaccgccaaagccaatgagcgcggacttgttgaggcagaaaccctcaaaaaagtgcaggaaagcttagtcagcacacttgaagaaatcatgtctattcaagaagaaggcaggatgaaacgcaggcgtgccgaggaggagcttattatcatggaaggcgatttaaaaaagaagctgcttgatatggggtcaggccgggataacggctagatggcaaaaagtcttagctttaagttggctcgcagtcacgatataataagaaagacaggcaaaggatttgtttaaaaatggacacacctttatatacagcgctgatgaagcatgcgcaccgaaatacgtattcttttcatgttccgggacatcacaatggagatgtcttttttgatgaagccaaatctgtatatcaatctcttttatctattgatatgactgagatcacgggtcttgatgacttgcatcacccgacgggggtcattaaggaagcgcaggatttggtgagcagattttacggctctcaggaaagtttctttctcgtcaatggaacgaccgtcggcaatctggcgatgattttagctgtttgtgaaccgggagaacccattctgatccagcgtaattgtcacaagtctgttttccatgcggcggcattgacgggagccaagccggtttatttggcaccggaaatcgatgaaaacatgcatgtgccggcacatgtatccctttcagtcatcgaaaaagcgctggcgtcatatccgaacgcgaaaggacttgttctgaccaatccgacttactacgggcatgccgccgatttgactgcggcagttaaaaaagcccattcatacggcgttcctgtactggtggatgaggctcatggggctcactttgtgttagggcagcctttcccgccttcatcattggctatgggggcggacgccgttgttcaatcggctcataaaacgcttccggctatgacaatggggtcttactttcatttgaacagcaccagaattgacagagatcgattaacttattatataagcagtttgcaaagcagcagcccgtcatacccgattatggcatctttagatacggcgcgcgcttatgtgcaggatattgctgaaaaagggacacttcccgttcatatggagcacattgagaaaatcaaacgaaggttcgcatcaatttcttctattgaaataatcgagccttccggatatggactgcgggcggacccgttaaaattaattcttcggtcaaagctcggacattccggctattcattacaacggattttggagagtgaaggcattgttgccgagctggctgacgagtaccaagtattgctcgtactgccgataggcggccggcggatgatagaacaggcagccgtaagaaacatacagcagaaactggagaatacaccgcccgataaattgccggatgccgtgagatggacatttccgtccatatcgacacttgaatacccgcaaaatgagatgcggaagtttaaaaaagagcttacagatataaataaggctgccgggcgcttgcatgcggggaacattattccttatccgccgggaattccgctgatcatggacggagaacggataacagaagagatcgtacaaaagctttcccgtttaatcggcatggacacgcatattcaaggcttgttaaacggggaacaattacttgtctatatagaagaggagaaatcatgagcggtttatttataacatttgaaggtcctgaaggtgcagggaaaacgactgtgcttcaggaaatgaaagagattctgtcggcagaggggctcccggtgacagcgacaagagaaccgggcggcatcgacattgcggaacagatcagagaagtgatcttaaataaaaacaatacactgatggatgcaaaaacggaggcgctgctttacgccgcggcgagaagacagcatttagccgaaaaggtgcagcctgcattgaaagaaggccgcattgtgctgtgcgatcgtttcatcgacagttcgctggcttatcaaggctatgcgagagggctcggcattgatgaagtcctttctattaatcagtttgcaatcggcgatacgatgcctgatgtcaccatctatttttctattgagccggaagaagggttgaaacggattacgtcgaatgattcaagagagaagaatcgtctcgatctcgaggccctgcactttcacacgaaagtacgggaaggataccaaaaggtcatgcagcgttttccggaaagatttcatacaatcgacgcttcgaaaaagaaggaactcgtcattcaggacgcacttcaagtgataaatgaagcattgaaaaaaattcagttgtgacctgtttctcataagttgctataatgaatgtaacgacaatgttctttccaacctaaagggggcctagagaatgaaactaatagtggcagtggtgcaggatcaggacagcaacaggcttttgaaagtattaaccgaccacaacttcagggtgacgaagcttgcgacaacaggcggattccttaaatcaggcaatacgacgtttatgatcggggtggaagatatccgtgtcgataaagcgctcagccttattaaagagaatggctgtaaacgtgatcagatgattgccccggtatccccgatgggcgggaatgcggattcctacgttccatatcccgtcgaagtggaagtcggcggagcgacggtctttgtcctcccggtcgatgaatttcatcaattttaaggatttgacgacgtgaaaataaattctgacttacgtacatttattgagaaaaagcagcaagctgaaatttgatcagctgagcaggttcttaacggatatagaaacgttcgggaaaaggctgacgaagtcgagaaacttcaaagacttagcgaaattcaaaggattggtaaaacgttttgtaaaagaggccgtagacagcggattatcgcatgagacggagaaaagctttgacctgtacggcagcagccggactctggggcttgtgaaagaaatagatgaaaaactgctccagctgacagaagaaatgttagatcaggaaaaaccggcaattgatttgctggatcgaatcggagaaataaaaggtttattgattaacctttacacatagagagtgatacaatggcaatatcatggaaggaaatgaccgggcagcagcccagagtaatgcggcttttgcataacagtattgaaaagaaaaggctttctcacgcctatctgtttgaaggcaaaaaaggtacgggcaaattggatgccgcactgcttctcgcaaaaagctttttttgccttgaaggcgggactgagccttgcgggaaatgccggaactgtaagcgtattgaatccggaaaccatcccgacctgcatgtggttcagcccgacggattatccattaaaaaggctcagatccaatcgcttcaggaagagttttctaaaacaggactggaatcgcataaaaagctatacattatatcccatgcggatcaaatgacgacaaatgcggcaaacagtctgctgaaatttttagaggagccgagtcaagacaccatcgcaattcttattactgagcagctccaccgaatactggataccatcgtttcgagatgtcaggttcttccgttccagccgcttcagccgaaagccatagaagaaagactgattgaacaggaagtgagccctcacatggcccggctcttagcaaatatgacaaataatattgcggaagcagtcgaattaagtcgaaatgatgagtttgcagagtccagagcgaaagtgataaaattgtatgaagtcttacatcagcggaaaggacatgcctttttcttcattcaggatcagtgggtgccctttttcaaagaaaaaacccatcaagaaatgggtcttgatatgctcttattgatataccgtgatgtattatccatccaaattggaaatgaagataaactgatttatcaagacttattccaatcaataaaacagcatgcgctgcaatttacacaacaaagcgttacgaaccaaattctcgctgttttagaagcaaaaaaacggcttcattccaatgtgaatgtgcagggattaatggagcacttggtgttaacgttgcaggagggataagcttgtacaacgtaataggcgtccgctttaaaaaagcggggaaaatttattattttgatccgaacggatttgatatagaacaagacagctgcgtcattgttgaaaccgtaagaggtgtcgaatacgggcaggttgtcatcgcaaataaacaagtggacgagcatgatgttgtgcttccgcttcgaaaggtcattcgcgttgctgatgaacgcgatcttctcattgtagaagaaaacaaacaggaggccctgtccgcttttgaagtctgtcagaaaaaagtggctgaccacggcttagatatgaagctggttgatgttgaatttacgtttgaccgcaataaagtcattttttactttacggcagacggacgggttgatttcagggaattggtcaaagacttggcttctatctttaaaacgagaatcgaattgcgccaaatcggggtgagggacgaggcgaaaatgctcggcggtatcggaccatgcgggagaatgctttgctgctccacgttcctcggtgattttgaaccggtgtccatcaaaatggcgaaggatcaaaatttatcgttgaacccaacgaagatctccggtctgtgcggccgtttgatgtgctgtttgaagtacgaaaatgatgagtatgagacggcaaaagaacagctgccggatttaggcgaaatgattacgacggcaaacggccccgcaaaggttgtcggtcttaatattctggaacgggtgcttcaggtggaactgaagaatcgtgaaaaagtgatagaatatacttgggaagagctcttggaagagggcgtcgtatccgcacaaaccacagattaacgaggtgtggaaccttggataaaaaagagttatttgatactgtcataaacctggaggaacaaatcggttcgctgtaccgtcagctgggtgacttaaagcagcatatcggcgaaatgattgaagagaatcaccatcttcagcttgaaaataagcatttgcgtaagcggcttgatgacacgacggagcaaattgagaaattcaaagccgatcagaaagaaacaaaaacacagaaggcagagcagagtgatataggagaagggtacgacaatctggcccggctgtatcaagaaggctttcatatttgcaacgtccattatgggagcgtccgcaagggagattgccttttttgtctgtccttcttaaataaaaaataaggaaaaggcttccgctgatgtcggaagcctttttcaaagagtgccgaaaggaataagattatggtttcattacgtgatgatgaaagattggattatttattagcagaggatatgaaaatagtacagagtccgacggttttcgctttttcattagatgccgtgctgctgtctaagtttgcatacgttccgattcaaaaggggaacatcgttgatttatgcacggggaacggcattgtgccgcttttgctcagcacaaggtcaaaagccgatatcaccggggttgaaattcaggaacgcttgtatgatatggcgctccgaagcgtggaatacaacgggctgggcggtcagatcagtctcattcatgatgatctgaaaaatatgccggaaagactcggacataataaatacgatgttgtcacctgcaatccgccttattttaaaacaccgaaagaggcggagcagaacctgaacgagcatctcagaatcgcaaggcacgaaatcctttgcacgcttgaagatgtgatttccgtcagcagcaaactgctgaagcaaggcggaaaagcggctctcgttcatcggccggggaggcttttggaaatctttgaactaatgaaagcgtaccgaatagaaccgaaacgggttcagtttatttatccgaaacaaggtaaagaagcgaataccattttggttgaaggaattaaaggcggccgccctgatctcaaaattcttcccccgctctttgtatacaatgaacaaaatgaatatacgaaagagatccgcacgattttatatggagacaaatagccatttcttttatgtgctgctgtgcaatgacaacagtctgtatgccggttatacaaatgatctgcaaaaacggctgaaaacccacaatgagggaaagggcgcgaaatatacaagggcgagaaggccggtttcgttatgccatgcggaatcatttgaaacaaaacgggaagcgatgcaggcggaataccgttttaagcagctgacccgaaagaaaaaagagcaatatatagaagaaaaacgacgcagcaaggaggctgtatatgttaagacgccagatgagttttaacggaaaatctgaaatgggaactctgtaccttgttcctacaccgatcggcaatttggaggacatgacctttcgtgcagtagagacgctgaaatcggctgatgtcatagctgccgaagatacgagacagacgaaaaagctgtgccatgtttatgatatagaaacatctctcatcagctatcatgaacataataaagaaagcagcggccataaaatcattgaatggctgaaaagcggaaagaatgtggcattggtcagtgatgccggcatgccgacaatttccgacccgggggctgagattgtgagagatttcacccaaatcggcggatatgtcgttccgcttccgggtgcaaatgcggcattaaccgcgctgaccgcatcaggcatcaccccgcagccgtttttcttctacggatttttaaacagacagaaaaaagaaaagaagaaagaactcgaaatcctgaaaaaacggcaggaaacgatgatattttacgaagcgccgcacagattgaaagaaacattaacagcaatgcatgacgttttgggtaatcgaaccatcgccgtcacgagagaattaacgaaaaagtatgaggaattcatcagaggaaccatcgccgaggtgattgaatgggcaaatgaagatcaaatccgcggtgagttctgtctcgttgtcgaaggaaatcaaaccgcagaaccggatgaagatgaaaagccttggtggacggagctttctgagacagagcatgtggagcattacataaacgaaggagcatcttccaaacaggccataaaacaaacagcggtagatcggggcgttccgaaacgcgagatttatgacgcttatcacattcaatcataaaaaaaaccgttcttgtatcgtaacaagaacggtttttgtatgaaatagcttatttttggttttgaagctggttttgaatttcagagatgatttgctcagcgccttctttgctgagtaccaatttgccgccggcaagtttaaggttatcatcagaaacttcaccagttacttggcaagtcatgtttggtttatattttttaaggatgattttttcatcatcaacataaatttcaagagcgtctttttctgcgatgcccagtgtacggcgaagttcgatagggataactacgcgtccaagttcatcaactttacgtacgataccagtagatttcattaacagtctcctcccgagagataattattttgtagtttatatttttcttcgtcattattcgacaaaattccttacattcctagcataacaaggtttccaataatcgtcaatctttttgtttactattgattgtaagaattagttcttatagtaagtaaagccttggaaatcctgaaataacaggctttttgactgctttttcgaacctattatcctactgaaaatccttttaaatcaagactttcgaaccaagatgttttatattagtagattatatacgacaaatttcgacatgttaagactttttttaatttcaataaaaatttttaattttatttactcttttacgcgcagtacgtatatatccttgatcttaaaggctaagatggtatcatagatagaggacaaatatcaatattgtatatcaaataaaaccgctctcgtcctttgggcgtgagcttttcgacattctgaatgggaggttgcaacatgccgcaagacaataatactttttatattacaaccccgatatattatccgagcggaaaattacatatcggccatgcttatactaccgtggccggcgatgcgatggcgcgttacaaaagattaaaaggatttgacgtacgctacttaaccggaacggatgagcacggacagaaaatccagcagaaagcggaggaagagaatatcacgcctcaagcttatgtggatcgtgcagttgctgaaatccaaaaactatggaagcagctcgacatttctcacgatgatttcatccggacgacggaaagccggcacaaagaaattatcgagaaagtgtttcaaaaacttcttgataatggtgacatttacctggatgagtatgagggctggtacagcatccctgatgaaacattctatacggaaacacagctggtggatgtggaaagaaatgagaagggtgaggttgtcggcggaaaaagcccggacagcggccacccggtcgaattaatcaaagaggagtcatacttcttccgcatgagcaaatacgcagaccgcctgctgaagttttatgaggaaaatccttctttcatccagcctgaatcacgcaaaaatgaaatgattaacaacttcattaaaccggggcttgaagatttggccgtttccagaacgacgttcgactggggcgtaaaggtgccgggaaatccgaagcatgtcgtgtatgtatggattgacgcactgttcaactatattacagcgctcggttacgatacggaaaatgatgagctttacaaaaagtactggccggctgacgtccatcttgtcggtaaagaaattgtccgttttcataccatttactggccgattatgctgatggcgcttgatctcccgctgcctaagcaagtattcgcgcatggctggttattgatgaaagacggaaaaatgtcgaaatcaaaaggaaatgtcgttgatccggtaacgttaattgaacgctacggcttggatgaacttcgctattatctgcttcgcgaagtaccgttcggttcagacggtgtctttacgccggaaggtttcgtagaacgaattaattatgacttggcgaacgacttaggaaaccttctgaatcgtacagtcgcaatgatccaaaaatattttgacggcgagattggttcatatgaaggaaatgtgaccgattttgattcagagctttcttctgtagccggtgaaacggttaaagcttatgaaaaggcaatggaaaacatggagttttcagtcgctttatcaacgctatggcaattaatcagccgtacgaacaaatatattgatgaaactgctccgtgggtgcttgctaaagaccaggaaaaagaaaaagaattacgttctgtcatgtatcatttagctgaatctttacgtatctcagccgtattgctccagcctttcttgacgcaaacgcctgaaaaaatgtttgcccagctcggagttgaggatcagtctctaaaagcttgggacagtattcagacattcggccaattgaagaacacgaaagtgaaaaaaggggaaccgcttttccctcgtcttgaagctgaagaagaagtagcttacatcaagcaaaaaatgcaaggaactgctcctgctaaagaagaaaaggcggaagagccgcaagaagcagagcgtcttcctgaaattacgtttgatcaatttatggatacagaacttcgcgtcgcagaagtcttgtccgcagagccggtgaaaaaagcagatcggctgctgaaattgcaaattgatctgggctttgaacagcgccaagttgtatcaggtatcgcaaagcattacacaccggatcagcttgtgggaatgaagatcatttgtgtaacgaatctaaaaccggtaaaactgagaggcgagctttctcaaggaatgatactggcaggagaatcggacggcgttctcaaagttgtagctgtcgaccagtcattaccgaaaggcactcgaattaaataaatagatgcaaaaggtgtttcacgtgtaacattccgtcgaacaccttttgtttttcaacaagaaaggagtttttatgatgctttttgatacacatgcgcacttaaatgccgagcaatttgacacagacttagaggaagtcattgcgcgtgcaaaggctgaaaaagttgaacggatcgtcgttgtcggtttcgacaaacccactatcacgcgtgcgatggagctgattgaggaatatgactttatatacgctgcgatcggctggcatccggtagacgcaattgacatgacagaggaagatttatcatggattaaggaactgtcctctcatgaaaaagtcgtggcaatcggagagatgggccttgattatcactgggataaatcaccaaaagacgttcagaaagaagtattccggaaacaaatcgctctcgccaaagaagtgaaccttccaattatcattcataatcgtgatgcaacggaagatgttgtcacaattttgaaagaagagggagcggaagaagtcggcggtattatgcactgctttacggggagcgcggaggttgcgcggcagtgtatggctatgaatttctatatttcattcggcggaccggttaccttcaaaaatgcgaagaaaccaaaagaagtagcaaaggaaattccgaatgaccgtttgctgattgaaacggactgtcctttcctgacaccgcatcctttccgcggtaaacggaatgagccaagctacgtaaaatatgttgctgaacagctcgccgaattaaaaggactgacgtatgaggaaattgcctcaattacaaccgaaaacgcaaaaagacttttccgcatgaactgacagaatgcgctgtcataacgtgtaaaagcttgtccgattcagtggatatgtgaaacggttctacaagcttccttctcctcataagataggttgtcgatatgtctctcttcctttttttgctttgtttttgcataatgagggatacgctgaaggtttttcatcttcgagatgggagggttgacagcattttagatactctatataatctctccgaggagaaggaggcgtttttcatcacacaaaaaatgaaaaaactgttttccgtaaagcttggtaaaagcaaggttattcttattgcagctattattctgctgggcggaaccgggactgcatacggggcacatgagctctcaaaacaatcagtttctgtttccatcaatggcaagaaaaagcaaatacgcactcatgcaaaaacggttggggaacttctggaagatttacatatagagacgagaaatgaagaccggattaccccgtctaagcagacagcattggcagacaacatgaatgtcgtgtatgaagctgcaaagcagatccgtgtgacaagaggcggagaagaaaagactttatggtcaacggcaaaaacagtcggcgcatttctgaacgaacagcatacacctgtgaatcagcacgataaaatagatccagcagcagatacgaaagtgacaaacggcatgaaagtcacggtcgacccggcttttcaggtcactgtaaatgatgcgggaaagaaaaagaaaatatggacgacttcgactacggtcgctgactttttaacgcagcataagatggacatgaaagacgaagataaagtaaaaccggcattacacgaaaagctcacaaaaaatcaggccggtatacaaatcactcgtatcgaaaaagtcaccgatgtagttgaggaaaaaatagcgtatcaagtgaaagaaaaagaagatgcgtctctcgacagcgggaaagaaaagatcgttcaaaaaggaaaagaaggcaaacttaaaaagcattttcatgttgtcaaagaaaatggaaaagaagtttcaagaaagcttgttaaagaagaaacatctgaaaaaagcaaagatcagatcattgcggtcggcacaaagcggcacagtcccaagattgagcagctcagtgcacctgtgaaggcatcttcgagcgaaaccggatcttccggtaaagtgattaccgtgtcttccacggcttataccgcaagctgcagcggctgttccggccatacggctacaggcgttaacctgacaagcaatccgaatgccaaagtcattgcggtagacccaagcgtcatcccgctcggcacaagagtccacgtagacggatacggggaagccgtggccgctgatacgggctcagccattaaaggaagacggattgatgtctttttccctgaaaaatcttcagcttaccgctggggaaagaaacaggtcaaaataaaaatcttaaattaattccgattcactcagagggttttgcgccctctgtttttttcgttataataggtaaagtgtattttcagtatattagacgtgacatgcaagcaaaggtttcgttttggatataaaaagtttttttggaggaagtaatgaaaattaaagaaattattgtagtcgagggacgcgatgacactgcgcgcataaaacttgccgttgatgcggatacgatcgagacaaacggttccgcaatcggagacgaagtcatcaggcagattcggctggcgcaggaaacgagaggggtcatcgtgctgacggacccggattttccgggggaaaagatccggaaaaccatttctgaagcagtacccggctgtaaacacgcatttctgcccaaacatcttgccaaaccgaaaaacaagcgcggcattggcgttgagcacgcatccattgaaagcatcagagcatgtctggaaaatgtgcatgaagagatggaggcaaagccgagtgagatttcagctgaagatgtcatacaggccggtctgatcggcggaccggctgccaaaagacgccgcgaacgattgggcgacctgctgaagatcggctatacaaacggcaagcagcttcaaaaacggctgcaaatgtttcaaatcaaaagaagtgattttattgatgcgctcgatgctatgaggcaggaggaacaggatgaacaataaagatatcgcgacacctatcagaacgaaggaaattctgaaaaagtacggtttctcttttaaaaagagtctgggacagaatttcttaattgatacaaatatattggacagaattgtggaccatgcggaaattacggatcggaccggagtcattgaaatcgggcccggaatcggcgcgctgacagagcagcttgccaaacgggcgaaaaaggtcgtcgcgtttgaaattgatcagcgcctgctgcccattctcaatgatacgctgtctccatatgacaatgtaacgatcattcatcaagatgtgctgaaagcagacgtaaaatctgtcattgaagagcagtttcaggattgtgatgaaattatggtgacggcgaatctcccatattatgtgacgacgcctatcatcatgaagctattggaagaacatcttccgttaaaaggaattgtcgtgatgctgcaaaaagaggtcgctgagcggatggccgctgatccttcctctaaggagtacggatcgctttccattgcggttcagttctatacggaggccaaaaccgtcatgaccgtcccgaaaacggtgtttgtgcctcagcctaatgtcgattcagccgtcatccgtctcttgcttcgtgacggcccggcggttgacgtcgataatgaaccgtttttcttccagctgattaaagcaagcttcgcacagcgccggaaaaccttgctgaacaaccttgtgaacaatcttccgggcggaaaagagaaaaaagctcaaattgaagaagttcttcaagaaacgaatattgacggaaagcggcgcggtgaatccctgtccatagaagaattcgcgctcctgtccaacggattgcataaagcccttttctaagagggctttttgttttgcgtcaccacttggactgccgctacataggctagaggagaaccttattcattcaactgcaagaaaagcttgaaacgtcaagcgccgcagcggaaagaggtgtatttgccaagacttctttcatgatgaggcttagtctatttgtggagtgggtaacgtgcaatttcaaataggagatatggtagccaggaaatcctatcaaatggatgttttatttcgcattatcggtatagagcaaacaagcaacggaaattcaattgccatcctgcatggtgacgaagtcagattgattgcggatgctgatttttctgatttggagcctgtcagaaaagacgaacaggccatgagaaagaaaagagatgaaagcaggatgaatgaatctctcgagctgctccgccaggattataagctgcttcgggaaaaacaggaatattatgcgacaaatcaatatcagcatcaggagcactactttcatatgcccggaaaggtattgcatctggacggcgatgaggcctatttgaaaaagtgcctgaacttttatgaaaaaatcggtgtgccggtatacggaattcactgccatgagaaaaaaatgccggcatcaattgacgagctgcttgataaatacaggccggatattttagtcatcaccggccatgatgcatattccaagcataagggtgacgtgaacgatttaagcgcctacaggcattctaaacactttgtcgaaaccgttcaaaaagcgaggcgtaaagtccctcatttggatcagctggtcatattcgcgggggcctgtcaatctcatttcgagtctttaatcagagcaggcgcgaattttgcaagttcgccctcacgcgtcaatatccatgcgcttgacccggtatatattgtcgcgaaaatcagcttcactccgtttatggagcggatcaatgtatgggatgtcctgagaaatacgctgacgagagagaaagggctgggaggaattgaaacgaagggtgtgctgcgtgtcggtatgccgtataaatcaaatggatgagtgataaaacccgcatatatttcgctatgcgggttaattattttacatattgatacataaatttccggaacttgtgaaaaataacgcagaaatcaatagaattttgtcaaaataattttgttgacaatgacttattaacgttgatataatttaaattttatttgacaaaattgggctcttgttgtacaataaatgtagtgaggtggatgcaatggcgaagacgttgtccgatataaaaagatcgcttgatgggaatttaggtaaacggcttacgttaaaagcaaacggcggccgccgaaaaacgattgagcgttcgggcattttagctgagacgtacccttctgtttttgtgatacaactagatcaagacgagaattcgtttgaaagagtttcatacagttatgctgatattctgactgagactgttgaattgacattcaatgacgatacggcaagctcagtagcattttaatgggcagtgaaccttttgtttactgctttttgttttgccttctaaagctcttctaattattccctcgaaagtttctgccgattaaacgaaagctataggtgtcacatgttttatcgtggcgtgcacgaatggtgatcaattctataaaaggggttgtttcgtttgggcagacgtcgtggagttatgtcagatgagttcaaatatgagctggcgaaggaccttggtttttacgatacggtgaaaaacgagggctggggaggcattcgggcgcgtgacgccgggaatatggtaaagcgcgcgattgagattgccgaacagcagatggcggctcagaaccaaaataaccgataatgcagtggcccgggggacaatccgttccccggttttttctatcggctgtcaaaaccggcgtcaatttcggataagtacctccgggtctccaaatgtgatacaatgttcatacttatgtttagatggagaagtaggtgaaagctatgcgtattttagaaaaagcgccggccaaaatcaatctgtccctcgatgtgacgagtaaacgcccggatggttatcacgaagtggagatgatcatgacgacaattgatttggcagatcggattgaactgacagaactgcccgaaaacgttatcagagtggcgtcgcataaccgctttgttccggatgatcaaaggaatctggcttatcaggcagccaaactgcttaaagaacggtttcaagtcaaaaaaggcgtttccattatgattacaaaagtgatccctgtagcggcagggcttgccggcggaagcagcgatgcggcagccacgctcagagggctgaacaggctttgggatttaaagctttctgtcgaagagctcgcggagcttggagctgaaatcggttcagacgtgtccttctgtgtatacggaggcactgccctggccaccggacgcggtgagaagatcaggcacatcagtgctccgcctcattgctgggtcgtgctcgccaaaccgacgatcggggtatcgactgccgaagtataccgccggctgaacttacagcaggttcggcatcctgatgtgcaggcgatgattgacgcgattgaagaaaaaagcttccaaaaggtatgcggacaattaggaaacgtattggagtcggttacgctcagcctccatcccgaggtggcgatgattaaaaatcaaatgaaacgcttcggcgctgatgcggtgttaatgagcggaagcggaccgactgtattcggtttggttcaatacgaatcgaaagtgcagcggatttataacgggttaagaggtttctgtgatcaagtgtacgcagtgcggatgatcggcgaacagaatgctcttgattaaatccgtatgttaagttatattatttttaaattattcggattttgggggtaagttcatgaagtttcgtcgcagcggcagattggtggacttaacaaattatttgttaacccatccgcatgaattaataccgttaacgtttttctcagaacggtatcaatcagcaaagtcatcaatcagtgaagatttaacgattattaaacagacctttgaacagcaaggcattgggacgctgcttacagtgccgggagctgccggaggcgtcaaatacattccgaaagtgaaacaggctgaagcagaagcgtttatacaggagctgggacagtctttagtaaatcctgagcgtatccttccgggcggttatgtatatttaacggatatcttaggaaaaccatctgtcctctctcatgtaggcaggctttttgcttccgtttttgcggagcgggagattgatgtggtgatgaccgttgcgacaaaaggaatccctcttgcttacgcagcggccagttatctgaacgttccggttgtcatcgtgcgaaaggacaataaagtgacggaaggctccacggtgagcatcaattatgtatcagggtcatctaaccgcattcaaacgatgtcacttgcgaaaagaagtttggctacgggttcgaacgttttgattattgacgactttatgaaagccggcggcaccattaacggcatgatcagtttgcttgatgagtttaatgcaaacgtcgcgggaataggtgtcttggttgaagccgagggagtgaatgaacggcttgtcgatgaatacatgtcactgctcacgctttcaaccatcaatatgaaagacaaaacgattgagattcaaaacggcaattttctgcgattttttaaagaacagcatttaaagaatggggagacagaaaaatgacaaaagcaatccatacaaaacacgcgccggcagcgatcgggccatattcacagggaatcatcgtaaacaacatgttttacagctcaggccagattcctcttactgctgaaggagaaatggtaaacggtgatatcacagaacaaacgcatcaggtgttcagcaatttaaaagctgtgctgaaagaagcgggcgcttctctcgagacggttgtaaaagcaacggtatttattgctgatatggagcagtttgcggaagtgaatgaagtgtacggacaatactttgatgtacataagccggcaaggtcttgtgtggaagtggcgagactgccgaaagatgctctcgtggaaattgaagtcattgcgctggtgaaatcttaaatctcagaaaagtggttccggtctccgggatcactttttttatgcagtatatgatccccaaatatggtttatcacctaattgtgtatgtatatcctatattttcaaaaaaactttttgaaacgtgcaggaatttaaaaagaatcgtggaattgttagactaatgcttttatatagggaaaaggtggtgaactactgtggaagttactgacgtaagattacgccgcgtgaataccgatggtcgcatgagagcgattgcatccatcacgctggatcacgaatttgtcgtacatgatattcgtgtgattgatggaaacaatggtcttttcgttgcgatgccgagtaaacgcacccctgatggagaattccgcgatattgctcatcctattaattccagcacgcggggcaagatccaggatgctgttttaaatgagtatcatcgtttgggtgattctgaagcattagaatatgaagaagccggggcttcttaaacataacaaaatgtaaggactgctgataaaggctgacacaaggccttttccggcagtccttttttaaatctgatttttcagtaataaagcgattacatagaaaattcttgcactttttgatgtcttcttgaaatcaacagctatttaggatatatttttctatggataaaagggatattggaggccattaaatggataagcggtttgcagtgattttagctgccggaaaaggaacgagaatgaaatcgaagctttacaaggtccttcatccggtatgcggaaagcctatggtagagcacgtcgcagacgaagctctgaaattatctttagcgaagcttgtcaccatcgtaggacacggcgccgaagatgtgaagaagcagctcggacagaaaagcgattacgctatccaagcagaacagctcggtacggctcatgcggtcaaacaggcaaaaccatttcttcacggagaaaagggtgtcacgatcgttatttgcggcgatacaccgcttctgacggcggagacgatggaagccatgctgaatgaacatacagacaaaggtgcaaaagccacggtgttaacggccgttgccgacgatcccgccggatacggaagaatcatccgcagtgaagacggcgccgttcaaaaaatagtggagcacaaggatgcttcggaacaagaacgtcttgtgaaagaaattaacacgggaacgtactgttttgataacgaggctctttttcgtgtcatcgaacaggtttcgaatgaaaatgcccaaggcgagtattatctgccggatgtgatcgaaatcctcaaagacgaaggcgaaactgttgccgcttaccagactggtaacttccaagagacgctcggagtgaatgatagagtcgctctttctcaggctgaaatgtatatgaaagagcgtattaacaaacggcatatgcagaacggagtcactttaatcgatccgatgaatacgtacatctcacctgacgcacgtatcggacaagatacagttatttatcccggaactgtgttaaagggacaagctgaaatcggcgatgaatgtgtcatcggccctcacactgagatagaggacagctcaatcggcagccgcactgtgattaaacaatccgttgtcaatcgcagcaaagttgggaatgatgtaaatatcggtccttttgctcacatcagacccgattccgcaatcggcaatgaagtgaagatcggaaactttgttgaaatcaagaaaacacaattcggcgaccggagcaaagcatctcatttaagctatatcggtgatgccgaagtgggcacggatgtgaatctgggctgcggctccatcacggtcaattatgatgggaagaaaaagtatttaaccaaaattgaagacggcgcctttattggctgcaactccaatctggtcgctcctgttacagtaggagaaggcgcgtacgtcgctgcgggttcaaccgtaactgaagatgtgccgggcgaagcgcttgccattgccagagcaagacaagtaaataaagaagattatgtgaaaaatattcataaaaaataatcctaaaatcggaggtttaccatgtctaacgaatacggagataagaatttaaagattttttctttgaattcaaatccagaacttgcaaaagaaatcgcggataatgtaggggttcaattaggaaagtgctctgttacaagattcagtgacggagaggtccagatcaacatagaagaaagtattcgcggctgtgattgctatatcattcagtctacaagtgcgccggtcaacgagcacatcatggaattgctgattatggttgacgctttaaagcgcgcttccgcgaaaacaatcaacattgtcattccgtactacggttatgcgcgccaggacagaaaagcaagatcacgtgaaccgattacggcaaaactttttgcaaacctgcttgaaacagcgggtgcgacacgcgtgatcgcgcttgatttacacgcgccgcaaattcaaggtttctttgatattccgattgaccacttaatgggtgttccgattttaggccattactttgaaggtaaagacttgaaagatatcgtcattgtttctcctgaccacggcggtgtgacgcgcgcccgcaaacttgcggaccgtctgaaagcgccgatcgcgattatcgacaaacgccgtcctagaccgaatgaggtagaagtgatgaacatcgtcggtaacgtggaaggaaaaacagcgattctgatcgatgatattattgatacggccggcacaatcacacttgccgctaacgcgctggttgaaaacggagctgcagaagtgtatgcatgctgtacgcaccctgtactgtcaggtcctgccgttgagcggatcaataactctaaaatcaaggagcttgtcgtaacgaacagcattaagcttcctgatgagaaaaaaatcgaccgctttaagcagctttctgtcggaccgcttctggctgaagcgattatccgcgttcacgagaaacaatctgtcagctatttattcagctaagccgaaactttaaggtttaaatcccagttattgtgggtattgttctaataggacgataaaacgataattaggatggtgctgaatatggcaactttaaaagcaaatgaaagaacagattttaaacgttcgacgcttcggaaaatccgtcattcaggacatgttccagggattatatacggtaaagaaacaacgaatacgcctgtctctttagacagtgtcgaattgcttaaaacattgcgggacgaaggaaaaaacacgattatcacaattgatgtcaacggaaatcagcaatcggttatggtgactgatcttcagacagacccgctcaaaaacgaattgacgcacgccgattttcaagtcgtgaatatgagtgaggagctggaggccgaggtgccgattcagctgacgggagaggcgaagggagtcaaagacggaggcgtcatccagcagccgctgcatgagctttcgattaaggccagaccgaaggacatccctcagacaatcaatgttgatatttcaggacttgagatgaatgatgtgctgaccatcgcagatctgactgctgacggcaattatacatttgcaaacgatccggaagaagtcgtggcttccatccttcctcctaagcaggaagcattcgaagaagatgcagaaccgtctcctggggaagagcccgaaggagaaaatcaataagcgctttaagacgtaacccgcccgaggttacgtcttttgtgctagaatgagaagaattacagcgatgttgagggaggatttacgatgcttgtgattgccggtctcggtaaccccgggaaaacctacgagaacacgagacataatgtcggctttatggccattgacgagctttctaaagaatggaatattgaattgaataaaacgaaattcaacggactttacggaatggggtttgtttccggaaaaaaagttctacttgttaaaccgcttacatatatgaatttatcaggggaatgtttgcggccgctactggattattatgatgccgatcatgaagatctgaaagtcatatacgatgaccttgatcttccgacgggaaaaatcagacttcggacgaaggggagcgcaggcggacataacggaattaaatcgcttatacagcacctcggaacccctgaatttgaccgggtcagaatcggaatcggccgccccgtcaacggaatgaaagtcgttgactatgtactgggagcttttacgaaggaagaagcgccgcatatcaatgatgccgtctcaaaaaccgtaaaagcctgcgaagcttccttaacgaaaccatttttagaagtcatgaacgaatttaatgcaaatgtataagataaataatgggagaccatactagggaaaaatgattttttcacatcaggaggtccaacgtatggctttgcattatttctgccgccactgcggctttaaggtagggagcctggaatattcgacggtgccgacacagtcacttggatttcagcacttaacaaatgaggaaagaaacgatatgatttcatataaagacaatggagatgtccatgttcttacaatttgtgaagactgccaagaggcgctggagcgcaatccgcactaccatgaacacaacacatttattcaataagaagctttggtgtagattctagaccaaagcgtttttctgttcttgcagaaaatagagaggagggcccatatggacaacattcaaacctttattaaagaaagcgatgattttaaatccattgtcaacggtttacatgaggggctgaaggaacagctgcttgcgggtctgtcaggttccgcgcgttctgtttttacctccgcccttgcacaggaaacgaaaaggccgattttctttatcacccataatttatatcaggcccaaaaagtgacggaagatctgacggcgcttctcggggatcaatctgtttttttataccccgtgaatgaattgatttcttcagaaattgcggtagcgagccctgaactgcgcgctcagcggcttgatgtcattaatagattaacaaacggagaagcgccggtcgttgtggcgcccgttgcggcagtgagaagaatgcttccgccgaaggagctgtggaaaagcagccagctcgtcatttcactcggagacgaaatagaaccggatcagctgtccgcgcgccttgtagaggtggggtatgagcgttccgatatggtttctgcacccggtgaattcagtattcgcggcggaattatcgacatttatccgctgacgtcggagcatccggtgcgaattgaactgtttgatacggaggtcgattccatcagaagcttcaattctgatgaccagagatcaattgagacgctcaaacatgtggcgatcggaccggcgaaggaattgatcatcagggcggaagaaaaagcccgggcaatggaaaggctcgataaagggcttgccgacagtctgaaaaagctgaagcaggacaaacaaaaggaaatgcttcatatcaatatctcacatgataaagaacggttatcaacgggacagactgatcaggaacttgtgaagtatctctcgtacttttacgaaaaacctgctagtttgctagattatacaccggcagacacgttgttactgttagacgaggtcagccgcattcatgaaatggaggatcagctgcaaaaagaagaggccgaatttacgacaagtctgctcgaggaagggaaaattctgcatgacattcatttatccttcagctttcaggagcttatgagcgaaaagcggcgcccggctatttattattcattatttttgcgtcatgtccagcatacaagccctcagaatatcgtgaatgtgacaagccggcagatgcagagttttcacgggcagatgaatgtgctcgcaggtgaaatggagcgctttaagaaatcaaacttcaccgtcgtctttttaggcgcaaataaggacagaaccgacagattggcatccgtgctggctgattacgaaattgaagccgcaaaaacggacagctccaaagcgcttgtgcaaggacaggtctatgtcatggaaggcgagctgcaatccggttttgaactgccactgatgaagctggccgttattacggaggaagagctgttcaagaaccgaattaagaaaaagccgagaaagcagaagctgacaaatgccgaacggatcaaaagctattccgagcttcaggtcggtgactatgtcgtccacgtcaaccacgggatcggtaagtatttggggatcgaaacactagaaatcaaaggcattcataaagattacctcaacattcattatcagggcagcgataagctgtacgtccctgtagaacaaatcgaccaggtgcagaagtacgtcggctctgaaggaaaagaaccgaagctttataaactgggcggcagtgaatggaaacgggtgaagaaaaaagttgaaaactccgttcaggatattgccgatgatctgattaagctttatgcggaacgggaagcaagcaagggctatgcgttctcgccggatcatgaaatgcagcggcagttcgaatctgctttcccttatcaggaaacagaggaccagctccgttccattcaggagattaaaaaggatatggaaagagagcgcccgatggatcgtttgctttgcggtgatgtcggttacgggaagacggaggtagccatccgagcggcctttaaagcgatcgccgacggaaagcaggtcgcgcttcttgtgccgacgacaatactcgcgcagcagcattatgaaaccattatggagcgtttccaagactatccgattaacatcggtcttctcagccgattcagaacgagaaaagaatccaatgaaacgataaaaggcttgaaaaacggaacggtagacatcgtaataggaacccacaggctcttatctaaagacgtcgtctataaagatctcggcttgctcattattgatgaagagcagcgctttggcgtaacgcataaggaaaaaatcaaacagatcaaagccaatgtcgatgtgctgactcttacagcgacgccgataccgcgtacgcttcatatgtccatgctcggtgtgcgggacttatctgttattgaaacgccgccggaaaaccgtttccctgttcagacatatgtcgtggaatacaacggcgcgcttgtgcgggaagccatcgaaagagaactggcgcgcggaggacaggtatatttcttgtacaaccgcgtggatgacatcgagcggaaggctgatgaaatttccatgcttgttcccgatgcgaaagtggcatatgcccacggaaaaatgaccgaaaatgaattggaaagcgtcatgctcaattttctggaaggggaatcagacgtccttgtcagcacgactattattgagacaggcgtagatataccaaatgtcaataccttgattgtgttcgacggagacaaaatggggctgtctcagctgtatcagctgagaggacgggtcggccgttccaaccgcgtcgcttacgcgtattttacgtaccgcagagacaaagtgctcactgaggtggcggagaaacggctgcaggcgattaaagaatttaccgagctggggtcaggctttaaaatcgccatgcgtgacttgacgatcaggggagcggggaaccttctcggcgcccagcagcacggctttatcgactcagtcggttttgacctgtactcgcaaatgctcaaggaagcgattgaagagcggaaaggcgatattccgaaaagcgaacagtttgagacagaaatcgatatcgagctggacgcgtatattcctgaaaactatatacaagacggcaagcaaaaaatcgacatgtacaaacgcttcaggtcaatcgccacaattgaggagaaaaatgagcttcaagatgaaatcatcgacaggttcggcagctatcctaaagaggttgaatggctgtttacggttgctgagatgaaggtatacggaaaatatgaacgcgtcgaactcatcaagcaggataaagacgcgatcagatttaccatttctgaagaggccagcgcacagattgacggccagaaattgttcgaactcggcaataaatacggccggcagatcggactgggaatggaagggaaaaagctgaaaatctcagtacagacgaaaggccgcaaaacggaagagtggctggagaccgtgctcggcatgctgaaaggccttcaggatgtgaagaaagaaacaatcgcgtcttcataaaaattgttactctctggtgtatattacatttgatgtgacggatactaatttcaagcgagtggcggaagctacataaagtaaagagctttagtactttcccttaaatatcatcacatgaaagagaggcaccagagagatgaaagctacaggtatcgtacgtcgtattgatgatctaggacgggtcgtcatccctaaagaaattcggagaacactgcggatcagggaaggagacccgcttgaaatattcgttgaccgcgacggagaagttatattgaaaaaatattctcctatcagtgagcttggcgattttgcgaaagaatatgcagatgcattgtatgacagtctcggccattccgtcttgatttgcgaccgtgacgcgtatattgccgtttcaggcagttcgaaaaaagaatttctgaacaaagccatcagcgatttgctcgaaaaaacgatggatcagcgcagctcagtggtagaaaacgacgtgaagtccgcgcagcttgttaatgacattgatgaagatatgagctcctatacaatagctccgatcgtggcaaatggcgatcctatcggcgccgtggtcatcttttccaaggagcaggcacttggagaagtagaacataaagcagtagaaacggcagccagttttttggcgagacaaatggagcagtaggtcttattaccattattgaaataagaaaacggagaaagagcagctcttttacaagtgctgttctttttcatattcatatgtgctctctatcggttcggccgttaggattgtgatataataagctcgttttatagacgtaattttctagcggctggaaggagcttttggatgaacgattcagttggcgccaagcggcaatcggcatggaaaggtgcttttgtgctcgtcgttgcgggtatcgtgacgaagatattaagcgccgtgtacagggttccttttcagaatattgtcggtgacgtcggattttacatttatcagcaggtgtatccgtttttagggatcgcggtcatgctgtcaacatccggttttccggtaatcatctcaaaattaatgaacgattatagcaatcataaacaaaaaataatgaaaatttccgccctttatgtcacggcggccggacttgttctgtttgcgctcatgtatgccggcgcggcgccgttggccggttttatgggtgacgcccgccttgtgatgctgataagggtcgcggcgttcggtttcatactgtttccgttcacggcggttttcagggggtatttccaaggtgtgcatgatatgatgccgtcagccttatcccagattacggaacagcttcttcgcgtggcggtgcttctcggtttatccttctggcttttgaaaagcggccgttcattatacgcggcgggtgcgggggcggcctcgggatcaattgccggaagcttggcggcgctttgtgtattggctgttttttggtataagcgggaagaaagcaagaaagacggcggacatatcgaaacggccgtcattgtaaaaaagctgctgctttattcagtcaccatctgtatcagcagtgtactcatgcttttgattcaacttgtagacgccttaaacttatattcactgctttcagacgggacggagagccatgccgcgaaacggctgaaaggcatatatgaccgcggacagccgctccttcagctgggaactgtgtttgccgtcagtattgccgcgtcattggttccttcaatttcaaaagcggtgcatgagaataagccgtttatcataaaagagaaagcaacatcagccgtcaagctctgccttgcggtagggatcggtgcatcagccgggcttttttgcattttagagccggtgaatatcatgcttttccaaaacagtgaggggacgcagaccttacaaatattcagcttatctatcttttttgcctcaattgcgcttacggcagccgcgattctgcaaggagcgggacataccgttttccccgccgtatccgttttggcgggaggggcgctgaaatgggtgctgaatgtttggctggtccccggctggggtattacaggagcggcactggcgaccgtcttggcatttgccgcagttgcgtgcctgaatctccggagaatttggtcgaagggctggctgacgaatatcggaggcgtgattgcccgtctgtgctggtgcagtctgctgatggtcttctttctgctcgtatatatgaagctatggcagttatttgttcccgtcagcagggccggagctgtatgcgagagtctgtctgcgtcagtcatcggagggctattgtttatttattgtatgataagaatgaagattttcacggacgaagagctgagcggccttcctttcggcagtgctttaagcaaattgaaaaagaggagagaaaaacatggcaggtaacattacggtcgtcggcctcggcgccggagacatggatcagttgacagtgggcgtacataagctgctgactcaggcgaagcatttatatataagaacgaaagaccaccctttgattccggaattagagcaagagacggaagcggacatccggtattttgatgatatttatgaaaaacatgatcagtttgaagcggtctatgaagagatcgcggacattctgtttgaaaaagcgaagcaagaggatgtcgtctacgctgtgcccgggcatccgtttgtcgctgagaaaaccgttcagctgttatttgaacgccgggaagaacaacaggtagctgttcatactgccggagggcaaagctttttggatgccacttttaatgcattgcgaattgatccgattgaagggtttcaatttacggatgcgcaaacaatgacgccggatgagctcgaactccgccatcacctgatcatttgccaggtttatgaccaaatgacggcctctgaggtgaagctgacgcttatggagaaattgcctgacgactatgaagtggtcatcgtcacggcagccggaagcaagggagaaaagatgaccaaggtgcctttgtttgaacttgaccgcaatgtagaaataaataacttaacaagcgtgtatgttccgccgattaaaaaagaagaactcctttaccaggaattttctgcattccgaagtattattcgcgagcttcgcgggccgaacggctgtccgtgggatcaaaagcagacacaccagtcattaaagaaatatatgattgaggaatgctacgaactgcttgaggccattgacgaagaggacacggatcacatgatagaagaactcggggacgtcatgcttcaggttatgctgcacgcccagataggagaagacgaggggtatttctcaattgatgatgtcatcagagacatcagtgcgaagatggtcagacggcacccgcatgtgtttaaggatgttaaggttcaggatgaacatgatgtcgtcgccaactgggaagaaatcaaaaaggcggaaaagcaaacaacatcctcttcattgctggatgccgtgccgaaaacactgccttctcttgcgaaagcggccaagcttcagaaaaaagccgcgaaaaccggctttgactgggatgacgttcaggatatatgggataaagtaaatgaagagctgaaggaattttctgcagaggcttccgccgaatcagcagatgaaatcagcttaaaagctgatttcggcgatgttttatttgcattggtcaatatcggccgatactataaaattgagcctgaggaagcgctcgccatgacaaatgacaaattccgcagacgctttgcttatattgagaaagaagcggcagcaaagggacttgaattgaccgcaatgtcacttgaggaaatggacaaattgtgggatgaagcaaaagaaatggagaggagattctgatatgagacttgataagtttttaaaagtatccagattgattaaacgccgcacattggcgaaagaggtcgccgatcaagggagaatcaccgttaacgggaatcaggcgaaagccagctcagacgtaaaagccggtgatgaactgacggtccgcttcggccagaagcttgtcaccgtgaaggtaaacgaattgaaagaaacaacgaaaaaagaagaagccgcgggcatgtatacaatcgtcaaggaagaaaaactcggcgaataggcttgttctaaacaaagctcccgcctcatacaatgcagtaataatgctaaaagtatcgaggatatgggggctgaatagatgaattcatattatgagcaaaaaggttcttcttctgttccggaacagcatgatgtaacgatgaaagggagaaagcatttagacatttcgggcgtcaagcatgtagaaagttttgacaacgaagagtttttgctggaaacggttatgggaatgctttccgtcagaggcgagaacctgcagatgaaaaatcttgatgtggaaaaagggattgtatctataaaaggcagggtgtttgaccttgtatatttagacgagcagcaaggggataaagctaaagggttttttagcaagttgtttaaatgacgctgacgacccaattttatacgatgctggcaatgaccggtatgggcgcctggctcggagcgtcgcttgatacatacaggctgtttgtcagccgcgccaaaacggccagatggctgttattcattcatgacattctcttttggattgtacaaggtctgctgtttttctatgtgctgctcaacgtgaatgaaggagaactcagggtatacattttcttggctgtcttactgggtattgcgacgtaccaaagcctgtttaaacgaatgtatataaaaatactgaaatttgccattcatcttgcggtgtctctttaccaattcgcaaaaaagctcattcagcacgtgctgttccgtccggtgcttctgctctttaagctgctcatcgggctgatcacggctatttctttatactcctatcgggtgagtgccttttttgcgaagtgtctttttaagatcgtagcgtttttgctgtatccgctgtttttcctgttgaaacaattattgaaacttcttcctgaaaagtggcgtcttactttcaaacgatattttcaaaaaagtgcaggatttttacaaaagagcaagaaactaatcataacaatcagatcgaccatgatacgtattttgaaaaggtgaaaggaggaccgtctgatttgaatctatctagagaacgtacaataactgaaattcaaaacgactataaagagcaggttgaacggcaatcccagcttatgaaaagaaggcggaaagggcttttcagacggttgatcgtattcggcgcccttgtgttgttgacggctattgtcttagcgggttctctttggtcacagacctcttcccttagcgcaaacgaagaaaagaaagctcagctggaaaaccaagtgaaaaaattgaacgcaaaacaggctgatttaaaagatgaaatttccaaattaaaggatgaggattacgtcacagagcttgccagaagagacttgtttatgtcaggaaatggtgagattctcttcaatgtagagaagaagagcaagtagccttgttgacacttaaatttttatttaggtataattaaacaaacgatctttttataagcctaaggaggagcactttttttatgtcgattgaagttggcagcaagttgcaagggaaaataacaggtattacaaatttcggagcatttgttgaattgcctggaggctcaaccggtctcgttcatatcagtgaggtagccgataattatgtaaaagacattaacgagcatttaaaagtcggcgatcaagttgaagtgaaagtcatcaacgttgaaaaagacgggaaaattggtttatcaattaaaaaagctaaagaccgtccgcaagccagacctagaaatgatttccgtccgaaagaatcttttgaacagaaaatgaacaagtttcttaaagatagcgaagaccgcttatcatctttaaaacgaaacacggaatcaaaacgtggagggcgcggagcaagaagaggataacttgctgctttctataaatacatggagcatccgtctatcccagcgggtgcttttttttgtatgtgtccgtatagtcagaaaattaaaactttaaagttcctgttgacggaatgaagaaacctttgtattatataacttgtgcttataagcacctatatggcggtgtagctcagctggctagagcgtacggttcatacccgtgaggtcgggggttcgatcccctccgccgctaccatatatatatggcccgttggtcaagcggttaagacaccgccctttcacggcggtaacacgggttcgaatcccgtacgggtcatcaagcgaatcggcttctgttgcagaagccggttttttcatatttagacaactttttgagaaatgtcggaggaaatacgaaaggaaaggggaacaagggagaaagcgtcgaagagttctttggaaatgttaccttcttttgacaaaatcctatctgggctttcatttataatgacaagcaacgaataaaacaggtgggggatgagagcaatggaaaaagcggaaagaagagtgaacgggccgatggcgggacaagctctggaaaaactgcaatcgttttttgaaaaggcggcaaagcttacagtccatcaagcgcattcactttttttctataagggtttcatttatgtcgtgatcggttttttacttggacgggctttcatattatctgaggttcttccgtttgcgctgccgtttttcggagcgatgcttttgatcagaagagataaagccttctatgcttgtctgtctttacttgcgggcgctttaaccatttcgccgaaacactctttattgattctcacagctttggccgtcttcactctattttcaaaaatcggtacatatatcgtgcaggaccgggtgaagatgctgccgatcgtggtgtttttctctatggctgccgcgagaatcggatttgtttattttgagagcggcgcttttaccacctatgattatgtgatggctgttgtcgaggcgggtctggcctttattctgacgctgatctttttgcaaagcctgccgatcttcacgatcaaaaaagtgaagcaatcgttaaaaatagaagaaatcatctgttttatgattttgatcgcatccgttttaaccgggcttgccggtgtttcatttcagggaatgcaggctgagcatatcctggcccgctatgtcgtgctgagtttttcctttgtcggcggggcgagcatcggctgtacggtcggtgtggtgaccggactgatcctcgggcttgcgaatatcgggaatctctatcaaatgagtctgcttgcgttttccgggcttcttggcgggctgctgaaagaaggaaagaaagccggagccgcagtcgggttagtgatcggctcattgctgatttcattatatggagaagggtctgccggattaatgaccactctttatgaatctttgattgccgttgttttgtttttgattacgccccaatcgattacgaaaaaggtggcgcgatacataccgggcactgctgagcacagtcaggaacagcagcagtacgcgaggaaaatcagagatgtcaccgcccagaaagtagaccagttctccaatgtgtttcatgccttgtcggagagcttcgccacctttcatcagacgtcttctgatgagcaggcagaggaaggggaagtggatctctttttaagcaaaatcaccgagcattcctgccaatcctgctataagaaaagcaaatgctgggttcaaaactttgataaaacatatgacttaatgaaacaagttatgcatgaaacagaagaaaaacagtatgcctcaaaccgcagattaaaaaaggagtttcaacagcactgttccaaatccagacaggtggaagagctgattgaggacgaacttgcccaccatcacgcccatctgacactgaagagaaaagttcaggacagcagaaggcttgttgccgagcagctgttgggggtttctgaggtcatggcggacttttctcgggaaataaaacgggagagggagcagcattttattcaggaagaacaaatgatagaggcgcttcagcatttcggaatcgagattcagcatgtcgagatatacagcttggagcagggcaatattgatatcgaaatgacaatcccgttcagcggaggacacggtgagagtgagaaaattatcgccccgatgctgtctgacattcttgaggagcagatacttgtcaaaagcgaacagcactcgactcatccgaatggctacagccatgtcgcgttcggttcgaccaagtcgtaccgggtatcgacaggcgcggctcatgcggcaaaaggcggcggccttgtctccggagacagctacagcatgatggaactgggggcgagaaagtatgcggccgcgatcagtgacggcatgggcaatggggcgagggcccattatgagagcaatgaaacgattaagctgctcgaaaaaattctcgaatcaggtattgatgaaaaaatagcgatcaaaacgatcaacagtattctgtctttacggacgacagacgaaatctactcaactctcgatctttctatcattgatcttcaggatgcaagctgcaaattcttgaaggtcggttcaacgccgagttttatcaagcggggagatcaagtcatgaaagttcaggccagtaatctgccgatcggcatcatcaatgaatttgatgtggaggttgtaagtgaacagttaaaagcgggagatctgctcgtcatgatgagtgacggtatttttgaagggccgaagcacgttgaaaaccacgacctgtggatgaagcggaaaatgaaagggctgaaaaccgaagatccgcaggaaatcgctgatatattaatggaagaggtcatcagaacgcgttccggccaaatcgaagacgatatgacagtggttgttgtccggattgatcacaacacgccgaaatgggcttccataccggtgccggcagttttccaaaataaaaaggagatttcttaatccattcgtataaatcactttccttctggcgaagatgggactaatcgtatcaccgggaggaatgtatgtgaataagggacatttaaatcaagttctgctggttacagatggctgctccaatcatggtgaagacccgatcgcaatggcggctttcgccaaggagcaggggattacggtgaatgttataggaattatggaagaaaacgcgattgaccaagaggcaatgaaggaagttgaaggcatcgccatggccggaggcggcgtccatcaagttgtgtacgcgtcacaattgtctcagacggttcaaatggtgacgaaaaaagcaatgacccagacgctgcaaggcgtcgtcaatcaagagcttaaacaaattttagggaaaaacgttgaaatggaagagctttctcctgaaaaacgcggcgaagtgatggaagtggttgatgaactcggcgaaacggttcatctgcaagtgcttgtgctggttgatacgagtgcgagtatggcgccgaaactgccgacggtgaaagaagcgctgatcgatctttccatcagtttaaattcccgggccgggcaaaatgaatttgccatgtgtatatttcccgggaaaagccaggaagttgagcttgtgctgaattggacgccgaagcttgaatctctttctgcactctttgcgaagctgtcgaccggcggtatcacccctacgggccccgctatccgggaagcgacgcagcagtttgagagaatccgctcaagaaggagcatgttggcagatgatgaacgacgctttaacgagtttggcatgtagtctggcaccggggacggcaattcagggcaaatggaacggcaaatcctacagattgctcaaacagcttggaaaaggggctaacggtattgtatatctggcagaagcatcaggcggacaggtcgctttgaaaataagcagcgacagcatgtctgttacctctgaagtgaatgtcttaaaatccttttcaaaggcccggtcgcaaacgatggggccttctttttttgatgcggacgacgcgtttattccgcagctgaataaaaatgtctctttttacgtgatggagtacatagaagggccgcttcttccgcaatatatcagcagtaagggagcggagtggattccggtgctgatggtgcagcttctttccagcctgtcagtccttcatcagcagggatgggtttttggtgacctcaaaccggacaatctcattgtaaccggaccaccggctgccattcgctgcattgatgtagggggaacgacaaaacagggccgcgcgattaaagagtatacggagttttacgacaggggctattgggggtatggaacaagaaaagcagaaccatcctatgacctgtttgctgtcgcaatgatcatgatccactgtgtccagaagaaagagtgcaaaaagtcaggacagccgaaagaacagcttcgttctatcattgaaggccacccgtttctgaataagtataagaaggttctgttttctgctttaaacggccaatatccgtctgcggaagccatgaagcatgacatcctgacggcggggcagagcgccgggagcaaaaggaaagccgccgccaagcctaagccgccgcaatcaaaaccgcggcagggcactgtatctcaaacgcggtataaacctaaacaaaaacccgcaaagcacaatggtttgtttgaaacaacacttattttaatcagcgttctcgccctttatttcgcttacatcgtcttttttctcatctaatgccggccggacgcctgcgctcatgcttcttctttgcttggagggaatgaaagtgataggatatgtatatctttaaaaaacctgctcattgtgagggggacattgtgaaaagcgtggaagattttttcaaaacatatcatcttcaggcggagggagaaacgattattgccggggtctccggaggccctgattcaatggcgcttctcagtatgctgaataaacacttcgggcattcctccgttatcatagcggcgcatgtcgaccatcagttcaggggtcctgaatctgaagaagatatgaagtttgtgcagtcatattgcgaagcggaacacatcctctgtgaaacggtacagattgatgtttctgcatacgcaaagaagaataggctgaacaagcaggctgccgcgcgtgattgcagatatcagtttttcgaagatctgatggcgaaacaccaagcgaagtttttggcgctggctcatcacggcgatgaccaggttgagacaatgctcatgaggcttgcgaaaggtacgctcggggcagggcttgcgggaatgcagcccgtccgcgaatttgcatccggctggctgatcaggcctctcctttatgcggcaaaggatgaaatccttgaatactgccgtcaaaaagggctcagctacagaacggatgagagcaatgcaaaagacgattatacaagaaacagattcagaaagaccgtgcttccttttttaaaacaagaatcacctgacgttcataaaatgtttcaaaaggtgagtgaagcactgacagaagacgaacaatacctgcagtcattaacgaaagaacgaatgaataaggttattacaagcaagtctgacacatcggttgaagtcaattcctctcaattgcttgcccttccgatacctttacaaagaagaggagttcaactaatattaaactatctttatgaaaacgttccatcgtcgttttccgcccgccacatacagcagtttctcgaatgggcggaaaatggaagcgcctcgggagtgcttgattttccgaaagggctgaaggtggtcaaatcatatcagacatgtttgtttacatttgaacaatggcaatgtgaaaaagttccctttgagctgcagctgcaaggagcggaaggcgagactgctgttctccccaacggctttatgatagaggtggccgttcaagctgaccctcatatcaaaaatgggaatgctgtttttatgacaagcagaaacaaggtgcaatttcctttaacaatccggacgagaaaaatcggcgaccggatcaaacttaaagggatgaatggctcgaaaaaggtgaaagatatatttattgatcataaactgcctctgcgggatcgggacgaatggccgattgtaacggatgcgagcggtgaaattatctggctgcctggcttgaaaaaatccatctttgacgatcttgtgatttcaaacagtgaccgcattgtattacaatatagacagcatgaaaagtgtagggggcaagcattaacatgaaacaggatatcgaaaaagtgctgatctcagaagatgagatccagcagaaagtaaaacagcttggagaacaattaacaagcgagtacagcgacacgtttccgttggcaatcggtgtgttaaagggagcgcttccttttatggctgatcttataaagcatattgatacatatttggaaatggacttcatggatgtatcaagctacggaaattccacggtttcttccggagaagtcaaaatcatcaaagatttggatacatctgtagaaggccgggacatcttaatcattgaagatattatcgacagtgggttaaccttgagctatctcgtagaactcttccgatatcgtaaagcgaaatcaattaagattgttaccctgttggataaaccaagcggaagaaaagcggacattaaagcagacttcgtaggctttgaagttcctgacgcgtttgttgtgggttacggacttgattatgccgaacgctatcgcaatctgccttacatcggagtattaaaaccggcgatttatgaaagctgatcggctgcctgcttccgagatggttatcggttgtattggaatgattttctatggtactattgaacatagttgtgcttactgtgggaggaggtaaggaatgaatcgggtcttccgtaataccattttttatttacttattttattagtagtaatcggggttgtgagttacttccagacctcaaacccgaaaacagaaaatatgtcgtacagtacgtttatcaagaacctcgatgaagggaaagttgatagcgtatcggttcagcctgtcagaggtgtttatgaggtaaaaggacagctgaaaaaatacgacaaagaccagtactttttaacacatgttcctgaaggaaaaggagcagaccagatatttgacgcaattaaaaagacggacgtaaaagttgatcccgcacaggaaacaagcgggtgggtgacgttcttaacgacgatcattccgtttgtcatcatctttattctgtttttcttcctgctcaatcaggctcagggcggcggaagccgtgtcatgaacttcggaaagagcaaagcgaagctgtatacggaagaaaagaaacgcgtgaagtttaaagatgtagccggcgcggatgaggagaagcaggagctcgttgaggttgttgagtttctgaaagatccccgcaaattcgccgagcttggcgccagaatccctaaaggcgtgctgctggtcggacctccgggaaccggtaagacattgcttgcgagagcctcagccggtgaagcgggcgttcctttcttcagcatcagcggatctgacttcgttgaaatgtttgtcggtgtcggtgcttcccgtgtgcgtgatttattcgaaaatgcgaaaaagaatgcgccttgcctgatcttcattgatgagatcgacgcggtaggacgtcagcgcggcgccggtcttggcggcgggcatgatgaacgcgaacagacgctgaaccagctgcttgtagagatggacggtttcagtgcgaatgaaggaatcattattatcgctgcgacaaaccgtgcggacattcttgaccctgcattgctccgtccgggacgttttgaccgtcagattacggtagaccgtccggatgtcatcggccgtgaagccgtattgcaggtgcatgcgagaaacaaaccgcttgatgagacggtgaacttaaaagcaatcgcttcaagaacacctggcttctcaggcgcagatttagaaaaccttcttaacgaagcggcactcgttgctgcccgtcaaaacaagaagaaaattgatatgcgcgacattgatgaagcaacggaccgtgtcattgcgggtcctgcgaagaagagccgcgtcatctcgaaaaaagaacgcaatatcgtggcgtaccacgagggcggtcacaccgttatcggacttgtgctggatgaagccgatatggttcataaagtaacgatcgttccaagggggcaggcgggcggatacgcggtcatgcttccgagagaagaccgttacttccagacaaaacctgaacttctcgataaaattgtcggtcttctgggcggacgtgttgcggaggaaattatcttcggcgaagtcagcacgggggctcacaatgacttccagcgggcaacgaacattgccagaagaatggtgacagagttcggtatgtcagaaaaactcggaccgcttcagttcggtcaatctcaaggcggtcaagtattcctgggccgggatttcaacaacgagcaaaactacagtgatcagatcgcttacgaaatcgatcaggaaattcagcgcatcattaaagaatgttatgagcgtgcgaaaaccatcctgactgaaaatcgcgataagcttgaattgattgctcagacattgcttgatgtggaaacattagatgcggaacaaatcaagcatctcgtggatcacggaaaactccctgagcgcaatttctcagatgaccatcttcaaaaagacgatgtgaaagtaaacatcctgtctaaaacagaagacgaaaagaaagacgagccgaaagaatagttcgctttctgatataaaaaccgccggcgtataccggcggtttttttactggtttcgttttgtttacaaaagagccgcagatcgtgtatggtattgtagaatgttgaaaatgttatgattagaaactattcaaaagtggtgatagaggttgttactggttatagatgtggggaacaccaacaccgtgattggtgtatatcatgatggggaactagaatatcattggcgcatagaaacgagcaggcacaaaacagaagacgaattcggcatgctgctccgctccttatttgaacattccggactgatgtttgaacagattgaagggattatcatctcatccgtagtgccgccgattatgttctctttagaaagaatgtgcacaaaatactttcacatcgagccgcaggttgtcggcccgggaatgaaaacaggtttaaatataaaatatgacaatccgaaagaagtgggagctgacagaatcgtcaatgccgttgcggcgattcagcagtatggcggccccttaattgttgttgatttcggaacggcgacgacgtattgctacatcgatgaaaacaaacaatacatgggcggcgcgattgctcccggcattacaatttcaacggaagcgctgtactcacgcgcggccaagcttccgagaattgaaatcgcccgaccggacaatatcatcggcaaaaacacggtaagcgccatgcagtccggcatccttttcggctatgtcggacaagttgaaggcattgtaaagcggatgaaatggcaggccacacaagaaccgaaagtcattgcgacaggggggcttgcgtcattaatcgcaaacgaatcagactgtattgatattgttgacccgtttcttactttaaaagggctggaaatcatttatgagcgaaatcgcgtgggtcacgtataggaggtaaacgatggattatttaattaaagcaattgcatatgacggtaaagtgcgggcttatgcagccagaacgacagatatggtaaatgaagcgcaaagaaggcatgacacgtggccgacggcatcagccgcaatcggccggacgatgacagcgtctctgatactcggagcgatgcttaagggtgaagataagctgacagtcaaaatagaaggcggcggcccgatcggagccattgtcgcagatgcgaacgcaaagggtgaggtaagagcatacgtatcaaacccgcacgttcattttgacctcaatgaacaagggaaactggatgtcagacgggcggtcggaactgacggaacactcagtgtcgtaaaagatttgggcttgcgtgattattttacggggcaagtagagattgtctcgggtgaactcggtgatgacttcacgtattaccttgtttcttctgaacaagtcccttcatctgtcggcgtaggtgttctagtaaatcctgataacacgattctcgctgcgggcgggttcatcattcagcttcttccggggactgatgaagaaaccatttcaacaattgaaaagcaattatctcaaatcgaaccgatttcaaaattgattcaaaaaggcctgacaccggaagaaatcttagaagaagttctgggtcaaaaaccggacgttctcgaaacaatgccggtcaaatttcactgttcttgttcaaaagatcgattcgaaacggccattttaggactaggcaaaaaagaaatacaagatatgatagaagaagacggaaaagccgaagcggtttgccatttttgtaatgagaaatatttatttacaaaagaagaactggaagagcttcgtgacgaaacaacccgctagctctt

SEQ ID NO: 58 - DNA, 59580 bp, Bacillus amyloliquefaciens
aggacgccgccaagctatattatggtaaaggcagctcatcatgagttgccttttttgtgtttttctgcatacattatataatatgagaaacgtaacgatatgcctttttgcaaaagcaggttttatgcttgtgcaaagtggaaataatagagatagagcgatacagttgaaaaatttcgcgaaacaccttatagtaaggttaaagtcaaatatagtcaaagtcaataaaggagggggttgagtgggacataatatttctgacatcattgaacagtacttgaaacaagtattagatcaaaatggcaaagaaattttagagatcaaacgcagtgaaattgctgataaatttcaatgtgttccttcccaaataaattatgtcatcaacaccagatttacaagtgaaagaggatatattgttgaaagtaaacggggaggcggcggttatattcgtattatcaaaattaaaatgaataacgaagtcgtcctcattaataatattatttcgcagattcatacccacttgtcccaggcagcctctgatgacattattctcagactgttagaggacggagttatttcggaaagagaagctaaaatgatggtgagtgtaatggatcgttcagttctatatattgatttgcccgaacgggatgaactaagagccagaatgatgaaagcaatgctcacatctttaaaactaaagtaagcgggtgaaaagattgatttgtcaagaatgcaatgagagaccggccacttttcactttacgaaagttgttaatggagaaaaacaagaagttcatatttgtgaacaatgtgcaaaagaaaatagcgattcatacagtataagtggaaaccaagggttctcgatccataatttattatcagggctgctgaatatggagtcttcatttcaaaacaccggttctcaaatgttcggctactcagagcaaggcacagcttgtaagaaatgcggtatgacgtttcagcagctgagaaaaacagggcgtttcggctgtgcggaatgttacgatacgttctacagccaaattacaccgatcttgcgaaaagttcacagcgggaatacggtgcatgccgggaaaattccaaaacgaataggtggaaacctgcatgtaagacggcaaatggaaatgttaaaaaaagaacttgaatctttaatacaccacgaagagtttgaaagagcagcggaggtcagggatcagatccgatcgttagagcagaaattaaaaagtaaagacagtgagggggaacaagggtaatgtcgctcaagcattttattcaggacgcactaagcaattggatgaagcaaaagggacctgaaagtgacattgtactcagcagccgtatacggttggcccgaaactttgaaaatataaagtttcctgccaggtatacgaatgaagaagcctcatccatcattcagcaattcgaagatcatttttcaggaaaagaacttcctgatatcggtcaatttcatttaatcagaatgagtgaagctcagcctttggaaaaacgggtgctgatggagaaacatctgatcagcccgaatttaactgaatccccttttggcggctgtttgctttctgaaaatgaagaagtcagcattatgttaaatgaagaagatcatatcagaattcaatgcctcttccccggcttccagcttctcaacgctataaaagcggcaaaccaggttgatgactggattgaggagaaagtggattacgcctttggagagaagagagggtacttaacaagctgtcctacaaatgtagggacgggactaagggcttcagtcatgatgcatttgccgggccttgtattaactaggcaaatgaatcgaattataccggcaattaaccaattaggcttagttgttagaggaatttacggtgaaggcagcgaagcattaggaaatatctttcaaatttcaaatcaaatcacactcggaaaatcagaacaggacattgtagatgatttaaacagtgtggctgcccagctgattgagcaggaacgttcagcccgagaagcgctttaccaaacctcgaaaattgaattggaggaccgggtattcagatcttacggtgttttatccaactgccgtatgattgaatcaaaggaaacggcgaaatgcctttctgacgttcggctggggatagaccttggaatcatcaaagggctatcaagcaatatacttaatgaactgatgattttgacacagccgggttttctccaacaatattcgggcggtgcattacggccgaacgaaagagacgcgagaagagcggctcttatcagggaaaggctgcatttagaaatgagtgcaaatagacaggaggatgattcgatatgatgtttggaaggtttacagagcgagctcaaaaggtattggcactggcacaggaagaagcactgcgcttaggccataacaatattggaactgaacatatcttattaggtctggttcgtgaaggagaagggattgcggctaaagcactccaagcactcggactcggttcggataaaattcagaaagaagtggagagcttaatcggacggggacaggaaatgtctcaaacgattcattatacgccaagagcaaaaaaagtcattgagctcagcatggatgaagccagaaagctaggacattcttatgtgggaacagaacacatacttctcggactgattcgtgaaggagaaggcgtggccgcgagagttctgaataatctcggtgtcagcttgaataaggcgagacagcaagtgctgcagcttctgggaagcaatgagacgggatcttctgcatccggtacgaacagcaatgcaaacacgccgacgcttgacagcttggctcgtgatttaactgcgattgcgaaggaagacagtcttgatccggttatcggccgaagcaaagagattcagcgtgttattgaggtattaagccgcagaacgaagaataatcccgttcttatcggagaaccgggtgtaggtaagactgcgattgctgaaggcctcgcacagcagatcatcaataatgaagtgccggaaattttacgtgataaacgcgtaatgacattagacatgggtacggttgtagccggtacgaaataccgcggagaatttgaagaccgcttgaaaaaagtaatggatgaaatacgtcaggccggcaatattattttattcattgacgaactgcatacactgatcggagcggggggagcagaaggtgcgattgacgcatcgaatatcttaaaaccttcactggcccgcggagagcttcaatgcatcggtgcgacaacgcttgatgaataccgtaaatatatcgaaaaagacgctgctctggagcgccgtttccagccgattcaggtggatcagccgtcagccgatgaaagcattcaaattttaaaagggctccgtgaccgctatgaagcgcatcaccgcgtatccattaccgatgaagcgattgaagcagcggtaaaattgtccgaccgttatatttctgaccgcttccttccggataaagcgatcgatttaattgatgaagccggttcaaaagtacgtctccgttctttcacaacgcctccgaacttaaaagagcttgagcagaaactcgatgaagttcgcaaggaaaaagacgctgccgttcagagccaggagtttgaaaaagcggcttctcttcgtgatacggagcagcgcctgagagaacaggtggaagacacgaaaaaaacgtggaaagaaaaacaaggccaggagaactccgaagtttctgtagaggatatcgcgatggttgtatccagctggaccggggtgcctgtatctaaaattgcccaaacggaaacagataagcttctcaatatggaaaacattctgcactcccgcgtcatcggccaggatgaagctgttgtagccgttgcaaaggctgtcagacgtgcaagagccggtctgaaggacccgaaacgcccgattggttcattcatcttcttaggccctacaggcgttgggaagacagagctggcacgagcgctggcggaatccattttcggtgatgaggaagcgatgatcagagtggatatgtccgaatacatggagaaacactcgacttcacgtcttgtcggttctcctccgggatatgtcggctatgatgaaggcggccagctgacagaaaaagtgagaagaaaaccttactctgtcgtactgcttgatgaaattgaaaaagcgcatcctgatgtgtttaacattctcctgcaagtgcttgaagacggacgcttgactgattcaaaaggacgcactgtggatttccgcaacacgatcctgattatgacgtcaaacgtcggagcgagcgagctgaaacgcaacaaatatgtgggcttcaatgtgcaggatgaatcacaaaaccataaagacatgaaagacaaagtcatgggagagctgaagcgcgccttcagacctgagtttatcaaccggattgacgaaattatcgtcttccactcccttgagaaaaaacatcttacagacatcgtgtcgcttatgtctgatcagttaacaaaacgtctgaaagaacaagatctctctatcgagctgacggatgctgcaaaagcaaaagtggcagaagagggcgtcgatttggaatacggcgcacgtccgttaagaagagcgattcaaaagcatgtggaggaccggttatcagaagaactcctcagaggcaatattgataaaggccagcacattgttcttgatgttgaggacggcgaatttgtcgtaaaaacaactgctaaaacgaactaatatagtgacaaacatgaggcatacgtaagcgagtgtatgcctcactttgttatatagagaaatattcgataaggaagaggtcttacaacatatatggctaaatcaaaaacaaaattcatctgccactcatgcggttatgaatccgctaagtggatgggaaagtgcccgggctgcggggcttggaatacaatggtggaagaaaccataaaaaaagcaccggcgaatcggcgggcggctttctcccactccgttcaaaccgtccagaaaccatcacccattacatcaattgaaacatcggaagaaccccgcgttcaaacaaagctcgaagaattcaacagagtgcttggcggcggcgttgtgaaaggctcgttagtattaatcggcggcgatccaggcatcggaaaatcaacgctccttctccaagtatccgcacaattagcagatacggccggcagcgtgctttacatttcaggggaagaatccgtgaagcaaacgaagctgcgtgccgacagacttggaatcaacagccaaatgttacatgttttatctgaaaccgatatggagtatatttcgtctgctatacaagagatgaaacccgcatttgttgtcgtagactccattcagaccgtgtaccaaagtgatatcacctcggctcccggcagtgtatcacaagtaagagagtgtacggccgaattgatgaaaatcgcgaaaacaaacggcatacctatttttatcgtcgggcacgtcacaaaagaaggatcgatcgcagggccgagattgcttgagcacatggtcgataccgttctatactttgaaggagagcggcatcatacattccgtattttgcgggccgtaaaaaaccgtttcggctccacaaatgaaatgggcatctttgaaatgcgggaagaggggcttacggaagtgctgaacccttctgaaattttcttggaagagcgttctgccggggcatcgggttcgagtatcgttgcgtcaatggaaggaacgagaccgatcctggttgaaatccaggcgctcatatcaccgaccagttttggaaacccgcgccgcatggctacaggcattgaccacaacagggtgtcgttaattatggctgtgcttgagaagcgggtgggtcttttgcttcaaaatcaagatgcatatttaaaggtcgccggcggggtcaaactggatgaaccggcgattgatttggcagtagccgtcagcattgcctcaagcttcagagatacaccgccgaatcccgcagattgctttatcggtgaagtgggtctgacaggagaagtccgcagggtgtcaagaatcgaacagcgcgtaaaggaagcggcaaaactcggcttcaagcgcatgatcatacctgaggcgaatgcagatgggtggacaataccaaaagggattgaggttgtcggagtagcaaatgttgcagaagcgcttcgtacttcattaggaggatcataatagatggaaaaagagaaaaaaggggcgaaacaagagcttgacctgtctgcaattctgcagttcgttgctccgggcaccccgctcagagccgggatagagaatgtacttcgggcaaatacaggcggcctgattgttgtcggatacaatgataaggtaaagcaagtcgtggatggcggttttcatattaatacatcatttgcgcccgctcacttatacgagctggccaaaatggacggtgccattattttaagtgattccggacagaaaattctttatgcgaatacgcagcttatgccggaagcgaccatttcttcttcagaaacgggaatgaggcaccgtacggcggaacgggtggcgaagcagaccggctgtctcgtcatcgccatttctgagcgcagaaatgtcattacgttatatcaggacagcatgaagtacacactaaaggacataggatttattttaacaaaggcaaatcaggccattcaaacgcttgagaagtataaaaccattttagacaaaacgattacggctttaaacgcattagagtttgaggagcttgtgacattcagtgacgtgctgtccgtcatgcatcgatatgaaatggtgctccgaataaaaaatgaaatcaatatgtatattaaagaactcggaacggaaggccacttaatccgtctgcaggtgattgaactgattacggacatggaagaagaggcggcacttttcatcaaagactatgtcaaagaaaaaatcaaagatccgttcgtgctgttaaaagagcttcaggatatgtccagctatgatctgcttgatgattccattctgtttaagctgcttggatatccggcttctaccaatattgatgattatgtgctcccgagaggatacaggctgctgaacaaaattccgcgtctgccgatgccgattgttgaaaatgtggttgaggcgttcggatttttgccaagcataacggaagccactgtagaagagcttgatgatgttgagggtatcggcgaagtgcgcgccaaaaaaatcaaaaaaggcttaaaacgccttcaggaaaaacactatatagatagacagctttaagaatcgcttaaacctgtcggaatccgggtatattattgttagtttttgtttattctgaatttgtaggctctgacagtctgctgaaaaaatgctacttaaaaggaggtggaggtatgttaaaacgaatagttcaggcgttcttcattattgtgggcggcgttgtcggtatctttttaatacctgaattgtttgtgctgtcaaatatacaggacatacctttaataacaaacgcatatacgtctgctgcaattggtgctattatcttttttctcatcagtatatggacgacagaatatgtgattaattgggtaaaatggattgaagattctttactgagagctccggtgccggatctgttattcgggagtctcggattggtttttggacttatcatcgcatatctcattgtaaacgtgattccgctggacaatattccgtaccgtatattcagcaccatcattccggtctttctggctttctttctcggttatctgggcttccaagtcggatttaagaaaaaggatgaactgatcagtcttttctccatttctgcaagaatgcagaagaaaaagggaagtgctgatgaggagcaggaggaacaggataaaaggctgaaaatcttagatacaagtgttattattgatgggagaattgcagatatttgtcagacgggctttttagaaggcgtcattgtcattcctcaatttgtgctggaggaattacagcatatcgctgattcttcagatgttttaaaacgtaacagaggacgacgcggtctggatatcttgaatcgcattcaaaaggaactggatattacggttgaaatttatgaaggcgacttcgaggacattcaggaggttgacagcaagcttgtcaaacttgcgaagctgacatccggcgtcgttgtgacgaatgattttaatttaaataaagtatgtgagcttcagaaggttgcggtactgaatattaatgaccttgcaaacgcggtgaagccggttgtgcttccgggcgaagagatgaatgtgcaggtgattaaggacgggaaagagcataatcaaggtgtggcttacttggatgacggtacgatgattgttgtggaagaaggccgcaattatatagggaaacatattgatgtgctcgtaaccagcgtactgcagacagcggcgggacgaatgatttttgccaagcccaagctgcttgagaaagctctttaagagggagttcatatggagtatgttgtcgttattccggctgccggacaaggaaaacggatgaaggccgggaaaaataagctgttcatcagcttaaaaggtgcgcctgttattatacacacactgcgggtttttgaaagccacgcaccctgtcagaaaataatcttggtgataaacgagagtgaacgggaagattttcgccagctgctggcccaatttccgattcagacggaaattgagcttgttaccggaggtgcggagcgtcagaacagtgtatacgaaggactgaaagtgattgataaggaatcggtcgttcttgttcatgacggagcgcgcccgtttgtcacacatcagcatatcgataagctcgttgaaacagcagaggaggcgggagcggctgtcctggctgttcctgtgaaagacacgataaaacgggcggaaggctcccgggttgcggagacctttgatcgttcaagcttgtgggccgttcaaacgccgcaagcttttcgtctttctttattgaagacggcgcatatggaagcggaaaacaaaggcttcttagggacggatgacgccagcctcgtcgagcgtcttgatggatatcaggtgagtatcgttgaaggcagctataccaatattaagctgacaacgccggatgatctgatatccgcggaagcaatcatgaaagcggaaagtgggaatcataatgtttagaatcggacaaggatttgatgtgcatcaattaacggaaggccgtcctctcatcatcggcggaattgaaattccttatgaaaaagggctgctcggacattcagatgctgatgtattgctgcatacagtcgcagacgcgtgtctcggagcggcaggtgaaggagatatcggcaagcatttcccggatactgatccggaattcaaggatgcggattcttttaagctgcttcagcatgtctggaacattgttaaagaaaaaggatacgtactcggaaatatagactgtacgattattgcgcaaaagccgaaaatggcgccgcatattgatgctatgagaaaacggatagcggaaggccttgaggcggacgtctctcaagtaaacgtaaaagcgacgacgactgaaaagctcgggtttaccggaagagctgaaggaattgccgctcaggcgaccgttctgatccaaaaagcctgatcattgttttgatgcccggtctatttggtggtagaatagatacatatattcggctagaggctacagacgagatgaaaggaagtatttgaacatgggaaatgaagtacgcgttcgttatgcaccgagtccgaccggacatttgcatatcggtaacgccagaacagcgctttttaactatttatttgcccgcagccaaggcggaaagtttattatccggattgaggatacggacaaaaagcgaaatattgaaggcggagagcaaagccagctcaactatttgaaatggctcggcatggactgggatgaaagtgtggatatcggcggagaatacggcccgtaccgccagtctgagcgtaacgacatttacaaaaagtactatgaagagcttcttgaaaaagggcttgcttataaatgtttctgtacggaagaagaacttgagaaagaacgtgaagagcaaatcgcccgtggggaaatgccgcgctattccggcaaacacagaaacctgactcaggaagagcaggagcagtttttagccgaaggcagacagccgagcatccgtttccgcgtgccggaagggaaaatcatcgcatttaacgatatcgtaaaaggtgagatttcttttgaatcagacggcatcggcgactttgtcatcgtcaaaaaagacggaacaccgacgtataactttgctgtcgcgattgacgattacttaatgaaaatgacgcacgtgctccgcggtgaggatcacatttcaaatacaccgaaacagatcatgattttccaggcattcggctgggatgttcctgtcttcggacatatgacgcttatcgtaaacgaaagccgcaaaaaattaagtaaacgtgatgaatcaattatccagtttattgagcagtatgatgagctgggttacctgcctgaagcgctgtttaactttatcggacttctcggctggtctcccgtcggtgaagaagagcttttcacaagagaacaattcattgaaatttttgatgtaaatcgtttgtctaagtcaccggctctgtttgatatgcataaactgaaatgggtcaacaaccaatacgtcaaagcgctggatcttgatcaagtggttgagctgaccttgccgcacctgcaaaaagctggaaaagtcggcactgagctttctgccgaggagcaggaatgggttcgtaaattaatctctctttaccatgagcaattgagctacggcgctgaaattgtcgagctgactgatttgttctttaaagatgagatcgagtataatcaagaggcaaaagccgttctggaagaagaacaggtgcctgaagtgctcagcgtatttgctgcgaagcttgaagagcttgaagaatttacgcctgagctgatcaaagcctcaattaaagctgttcagaaagaaacaggccataaaggtaaaaagctgttcatgccgattcgtgtagcggttaccggtcagacacacggtcctgagcttccgcaggccattgagctgatcggcagagaaacagccgtcagacgcctgaaaagcatttaaatatacgattgttgacagggaagagtataaaacaatgaccattacagaaagaatcttcatcggctgagagagattcatgcgtcatgttttagaagtgcgcccttaagacctttgaagaacatttctgcggaaatcagtatttaaaggcggccgccgccgttaccggcttttaagttgggaaaacagtgacttgtttttcaaacagagtggaaccgcgcggtaaaagcgtctctgtcatgtttacatgcagaggcgctttttttataggcggaaaaacagactggagcggggagagaatggggggaagcatgtgttttttaaaatgctaaaagaagacatagatacagtgttcgatcaagatccggcagcaagaagctatttcgaagttgttttaacttattctggtttacatgctatatgggcgcatcggattgcacatgctttatataaacggagatttttcttcctggcgcgcctgatatcacagattgcccgtttctttaccggaattgaaatccatcccggcgcgaccatcgggagaaggtttttcattgaccacggtatgggggtcgtcataggggaaacatgtgaaatcggcaataacgtgacggtattccaaggtgtcactctcgggggaacgggaaaagaaaaggggaagcggcatccgaccataaaagatgatgctttaattgcaaccggagcgaaggtgctcggctctattacggtcgggcagggttctaaagtaggggccggttccgttgtgcttcgtgatgttcccgacttttcgaccgttgtcggcataccggggaaagtcgtcattcagaacggaagaaaaatcaaacgcgatctcaatcaccaagacttgcccgatccggttgctgaccggtttagagcattggagcagcagatttttgaactgcaggctgaactggaagataaaaaagaaaggatcaaccaaaaatgaccattacactttataatacattgacacggaaaaaggaaacattcgttcctcttgaggaaggcaaagtaaaaatgtacgtgtgcggaccgactgtatacaactatattcatatcggaaacgcccgtccggcgattgtgtatgataccgtacgcaactatttagagtataaaggatacgatgttcaatacgtatcgaattttaccgatgttgacgacaaactgattaaggcggccaacgagctcggcgaggacgtcccggccgtttctgaacggtttattaaagcgtattttgaagacgtgggcgccctcggatgccggaaagcggatcttcacccccgggtcatggaaaacatggacgccattattgaatttgtcagcgagctgattaaaaaaggctacgcttatgaatcagaaggcgatgtctatttcaaaacaagggccttcgaaggctacggcaagctatctcagcaatcaattgatgaactcagatcaggcgcgcgtatccgggtcggcgagaagaaagaggatgcgctggactttgctctttggaaagctgctaaggacggagaaatatcatgggatagcccttggggaaaaggccgcccgggctggcatattgaatgctccgcaatggtgaaaaagtatttgggtgacgaaatcgatattcatgccggcggtcaggacctgacattcccgcaccatgaaaacgaaattgcccaatctgaagcattaacaggcaagacattcgcaaaatactggcttcacaacggatatatcaatatcgataatgagaagatgtcaaaatctctcggcaactttgttttggtgcacgatatcattaagcaatatgacccgcagcttttgagatttttcatgctgtccgttcattaccgccacccgatcaactattcggaagagctgcttgagaaaacaaaaaacgcgtttaaccgcctgaagacggcctatagtaatttaaaccatcgtttgattagcagtacgaatctgactgacaatgatgaggaatggctcgctaaaattgaagagcaccgcactgcgtttgaagaagcaatggatgatgattttaatacggcgaatgcgatttccgtttggtttgatctggcgaagctcgccaattactacatgcaggaagacaatacggcggatcacgtcattaaagcctttatcagcatgtttgacagaatcggatctgttctcggacttacgctcggcgaagaagtgcttgtcgacgaagagattgaagagttgattgagaagagaaatgaagcccgccgcaatcgcgattttgctttgtcagaccagattcgcgatcagctgaaaagcatgaatatcattcttgaagatacggcccagggaactcgctggaagcggggagagtaagcggatgcttcaatttgaacaaatcaaagattcaaagcagttaaacggtcttgcgcttgcttatatgggtgatgccatttttgaaatatatgtccggcatcacctgcttaagcagggctttacgaaaccgaatgaccttcataagaaggcgagccggattgtatcggcaaaatcacaggcagacatattgttccgccttcaggacgaatcctttttcacggaggaagaggaagccgtgctgagaagaggcagaaacgcgaaatcagggacgacgccaaaaaacacagatgtacagacgtaccgccatagtacagcttttgaggctttactcggatacctttttcttgagaaaagagaagaaagactgaatcagctgattgctgaggctatacaagtcgggacgtcagggaggaaaacaaatgagtcagcaacatgattacgtcataggaaaaaacgctgtgattgagacgttaaagtcagatcgcaagctgtataagttatggatggcggaaaacacagtaaaaggacaggcgcagcaagttatggagcttgctaaaaagcgcggcgtcaccattcaatttgtaccgaggaaaaaactcgatcagatggtggaggggcagcatcagggtgttgtcgcccaggtggcagcatatgaatatgcacaattagacgaattatataaaagagcggaagagagaaacgaacagcctttctttctcatattggacgagctggaagaccctcataatctcggttccatcatgagaacggctgacgctgtcggtgcacacggcatcgtgattccgaaacgcagagcggtcggactgacttcgacggtcgcaaaagcttcgaccggtgcgattgaacacattcccgtcgtgaaggtgaccaaccttgcccggacacttgatgaaatgaaggagcgggggatttgggtcgtcggaacggatgcatccgcccgggaagactaccgctctatggacggcaagatgcctttggcgctcgttatcggaagcgaaggcagaggaatgggccggcttgtgaaagagaaatgtgattttctcattaagcttccgatggccggaaaagtcacgtctttgaatgcgtcggtagcggccggccttctcatgtatgaagtctaccggaagcgcaatcctttaggggaatgaagacagatggacatcctgttagtagacggatacaacatgattggagcttggccgcagctaaaggatttaaaagcgaacagttttgaagaagcgagagatgtactgatccagaagatggcggaatatcagtcctacacgggaatcagagtcattgtggtgtttgacgcacacctggtaaaaggcatagagaaaaaacaaacgaatcacagagtcgaagtgattttcacacgggagaatgaaacggcggatgagcggatcgagaagcttgcccaggcgctgaataatattgcgacacagattcatgtcgcaacttccgattatacggagcagtgggcgatcttcggacaaggggctctccgtaaatccgcccgggagctcctgagggaagtggatacgatagaacgccggattcaaaggcgggtttcaaagatcacttctgaaaaaccaccgggtaaaatcgagctgtccgaagaggttttgaaaacgtttgaaaagtggcgccgaggcggtctggattaggttgacgctttttcgcccattaatgtataatatttctatctacgtgcgccggggggatcgcagtgaatctacagaacagcaagggaaagttcaacaaagtgcaattttgccagttggaggacgagcaggtcattgaaaaggttcatgttggggatagtgatgcgttagattacttgattacgaagtaccgtaattttgtacgggcgaaagcaaggtcttattttttaataggggccgacagagaagatattgtacaggaagggatgataggcttatataagtctatccgagactttagagaggacaagcttacttcatttaaagcttttgcagaattatgcattacccgccagattattaccgcaataaagacagctacccgtcagaaacacattcctttaaattcctatgtttctttagacaaacctatttttgatgaagaatctgacagaacactgcttgatgtcatttcaggcgctaaaacgttaaatcctgaagagatgattattaatcaggaagaatttgatgatatcgaaatgaaaatgggagaactgctgagcgatctggagagaaaggtgcttgttttgtacttggacggaagaagttaccaagagatttcagatgacttaaaccgacacgtaaaatcaatcgataatgccctgcagcgcgtgaagcgcaagcttgaaaagtatttagaaataagagagatcagcctgtagcaggtttctgtgtcatattgacagaatttttctgactgtgctattttattaagataaatgaatgtttaggaaaaggtgtaacgacatgagaaaaaagattacgctggcatgcaaaacatgcggaaatcgtaattatacgacaatgaaaagctctgcatcagcggctgagcggttagaagttaagaagtactgcagcacttgcaattcacatacagctcatttagaaacaaaatagtgttcgctttttaaattgtggaggtcttttacatgcgcatgatgagtttctttaaagatgttgggaaagaaatgaaaaaggttagctggcctaaaggcaaagagttaacgcgctatacaatcacggtgatttcaacggttatcttttttgttatcttttttgccctccttgatacaggaatttctcaattaattcgtttaatagttgaataatgatcagcaatacgtgctataatagatcataatatcgtttgccaaaacccgttcagcgggttttttattgtgttgttgaaaaaggattcataggccctgagcctattttttgttttacacttcatttttaaatgcggggagggaaggactgcagagtcctgatagaatggaaaagaattggtatgttgttcatacgtattccggttatgaaaacaaagtaaaagcaaaccttgaaaaacgtgtggaatcaatgggaatgcaggataaaattttccgcgttgtcgtccctgaagaagaagagactgatattaagaacggcaagaaaaaagtagtcaaaaagaaagtgttcccgggttatgtgcttgttgaaatcgtcatgactgatgattcctggtatgtggtccgcaacacgccgggcgttaccggattcgtcggatcagccggttcaggctcaaagccgactccgcttcttcctggcgaagcggaaaccatcttaaaacgcatgggcatggatgagcggaaaaccgacattgattttgaattgaatgagacagtcaaagtcatagacggacctttcgccaactttacaggatcaattgaagagattgattatgataagagcaaagtgaaagtattcgttaacatgttcggccgtgaaacgccggttgaactggaatttacccagatcgacaaattgtaatgtgaaaaaacttgaaattgctatatattaatgataatatagcaaaggtacgtcttggactaatccaaggcagctagcttgatatttcgtcattcatataaagaatgaaaccttgagtgggagggtttaccctattaccacatcacggacttaaggaggtgtgtctcgtggctaaaaaagtagtaaaagttgtaaaattgcaaattcctgctggaaaagctaacccagcgccgccagttggacctgcactaggtcaagccggtgtaaatatcatgggattctgtaaggagtttaacgctcgtacagctgaccaagctggtttaatcattcctgttgaaatttcggtttacgaagaccgttcatttacatttattacaaaaactccgcctgctgcagtattgcttaaaaaagcagctggaattgagtctggttctggtgaaccaaaccgtaataaagtggcaaccgttaagcgcgataaggttcgcgaaatcgctgaaacgaaaatgcctgacttaaacgcagcagacgttgaagcggcaatgcgcatggttgaaggtactgcccgcagtatgggtatcgttatcgaggattaatttgtttcttgtcgggttgcgagttttcacaagttcgcaacccttattcgtgggaggttattccgctataaccacataaggaggaaattttaaaatggctaaaaaaggtaaaaagtacgttgaagctgcgaagcttgtagaccgtgcgaaagcttacgacgtcgctgaagcagtggcgcttactaaaaaaacaaacacagctaaattcgacgctacagttgaagttgcttttcgtttaggggttgaccctcgtaaaaacgatcagcaaatccgcggtgcagttgtacttcctaacggaactggtaaaactcagcgcgtgcttgtattcgctaaaggcgaaaaagcaaaagaagctgaagctgccggtgcagactacgttggcgattctgattacatcgcgaaaatccagcaaggctggttcgaattcgatgtaatcgttgcgactcctgacatgatgggtgaagtcggtaaaatcggccgtgtgcttggaccaaaaggtcttatgccaaaccctaaaacaggaactgttacattcgaagtagaaaaagcaatcggcgaaatcaaagctggtaaagtagaataccgcgttgacaaagctggtaacatccatgttccgatcggaaaagtttctttcgaggatgaaaaacttgttgagaacttcacaacaatgtatgatacaatcctgaaagcaaaaccggctgcggccaaaggtgtttacgtgaaaaacgttgccgttacttctactatgggccctggtgtcaaagtagacgcttctactttcaacgtaaaataatatttgactttagatcagcattctgatatgattcaaaatgttgtaaaatataatatgtcatttataccgtagacagcaggggccgttgaggcttaatatcctgccgaggtgtatatatatcacagctattacgttacgtatgcttgtatatacagcctccatgtccacatggaggctttttatatgaaatcgtcgtcacagtcgtgatcacctagcggtataagtgttacacaaaatctacaggaggtgtaaccatgagcagcgcaattgatacaaaaaaagttgttgttgaagagattgcttctaaactgaaagaaagcaaatcaacgatcatcgttgactaccgcggacttaacgtttctgaagtaactgaactccgtaaacagcttcgcgaagctaacgtagagttcaaagtgtacaaaaacacaatgactcgccgtgcggttgaacaagctgaacttgatggtttgaatgatgtcttaactggaccgaatgcgatcgcattcagtactgaagatgttatcgctccggcaaaagttcttaacgagttcgcgaaaaatcacgaagctctggaaatcaaagcgggcgttatcgaaggaaaagtatcttctgttgaagaagtgaaagctcttgctgaacttccttcacgcgatggcttactttctatgttgcttagcgtacttcaagctccagttcgcaaccttgcacttgcagctaaagcagttgcagaccaaaaggaagaacaaggcgcttaatctgattttaccctaaaataaaacaaatggaggaatttcaaatggctttaaatatcgaagaaatcattgcttccgttaaagaagcaactgtacttgaactgaacgacctagtaaaagcaatcgaagaagaatttggcgtaactgctgctgctcctgtagctgtagctggcggagctgctgctggcggcgctgctgaagagcaaagcgaattcgaccttatccttgctggtgcaggttctcagaaaatcaaagttatcaaagttgttcgtgaaatcactggtcttggcttgaaagaagctaaagaacttgttgacaacactccaaaaccacttaaagaaggtattgcgaaagaagaagctgaagagcttaaagctaaacttgaagaagttggcgcttctgtagaagttaagtaatcttcacttgcctgtaggggaagctcgcttttatgaggcgggctttttctttgcttttctttaagtgccattaaaaaaggaggttctaataatgagtgaacactattattcagaaaaaccttcagttaaaagcgataaacagacatggtcatttacactgcggaacagatcttatacattcacaagtgacagcggcgttttctcgaaaaaggaagttgatttcggttcgcgcgtcttaattgaagcgtttgaagagccggagatcgacggtgacttcctggatgcaggctgcggttacggcccgatcggtctgtcgctcgccggtgcatttacagaccggaccgtgcacatgattgacgtgaatgaaagagccgtagagctgtcaaatgaaaatgcagaaaaaaacggaataaaaaacgttcggatttatcagagtgatttattttcaaatattgattctgctcaaacatttgcttctatttttacaaaccccccaatccgcgccggaaaaaaagttgtccatgccatttttgaaaaaagcgctgagcatttaagggcttcaggtgaattgtggatcgttatacagaaaaaacagggcgggccttctgccattgaaaaactgaaggagctttttgacgaagtttctgtggttcaaaaaaagaaaggctattatatcataaaagcaaaaaaagtttgacttgaattttcagctatgttaatattgtaaaatgccaatgtatatattttgcatgatatgctgaaataatcatagtgcatgtataaattatacaaacatggaaatgctaataaaatcggtatttgtttttggatgtggttttcttaattagaaacccttttttcttttgtcttgtaaaagtatttctttatcgtaagagatgcttattacacatataatacgcatgatttgaggggtgaatcagttgacaggtcaactagttcagtatggacgacaccgccagcgcagaagctatgctcgcattagcgaagtgttagaattaccaaatctcattgaaattcaaacctcttcttatcagtggtttcttgatgagggtcttagagagatgtttcaagacatatcaccaattgaggatttcactggtaacctctctctagagttcattgactacagtttaggagatcctaagtatcccgttgaagagtcaaaagaacgtgatgtgacttactcagctccgctgagagtgaaggttcgtttaattaacaaagaaactggagaggtaaaagatcaggatgtcttcatgggtgatttccctattatgacagataccggtacttttatcatcaacggtgcagaacgtgttatcgtatctcagcttgttcggtctccaagtgtatatttcagtggtaaagtagacaaaaacggtaaaaaaggttttaccgcgactgtcattccaaaccgtggcgcatggttagaatacgaaactgatgcgaaagatgttgtgtatgtccgcattgatcgcacacgtaagttgccggttacggttcttttgcgtgctctcggcttcggttccgaccaagagattctcgatctcattggtgagaacgaatatctccgcaatacactggataaggacaacactgaaaacagtgacaaagcgcttcttgaaatctatgagcgccttcgtcccggagagccgcctacagtagaaaatgcaaaaagcttgctggattcccgtttcttcgatccgaagcgatacgaccttgcgaatgtaggacgctataaaattaataaaaagcttcatatcaagaaccgcctgtttaaccagcgccttgcagaaacactggtggatccggaaaccggtgaaattctcgctgaaaaagggcagattcttgacagaagaacacttgataaagtattgccatacttagaaaatggaatcggcttcagaaaactttatcctaacggcggcgttgtcgaggatgaagtgatgcttcaatccattaaaatctatgctcctaccgatgcagaaggagagcagacgatcaatgtgatcggcaatgcttacatcgaagaagcgattaaaaacattacgcctgctgatattatttcttctatcagctacttcttcaacctcctgcacggagtgggcgacactgatgatatcgaccatctcggaaaccgccgtctgcgttctgtaggtgagctcctgcaaaaccaattccgtatcggtttaagccggatggaacgtgtcgtacgtgaaagaatgtctattcaagacacaaatacaattacgccgcagcagctgattaacatcagacctgttattgcgtctattaaagagttcttcggaagctcacagctttctcaattcatggatcagacgaacccgcttgctgaattgacgcacaaacgccgtctgtcagctctcggaccgggcggtttgacacgtgagcgcgcaggtatggaagtacgtgacgttcactactctcactatggccgtatgtgcccgattgaaacgcctgagggcccgaacatcggtttgatcaactcattgtcatcatttgcgaaagtaaaccgctttggtttcattgagacgccataccgccgcgttgatcctgaaacaggaaaagtaacgcctagaatcgactacctgactgctgatgaagaggataactatgtcgtagcccaagcgaatgctaagctgagcgatgacggttctttcttggatgacagcatcgtagcgcgtttcagaggggaaaacaccgttgtagcccgcaaccgcgtggattacatggacgtttctcctaaacaggttgtttctgctgcgacagcatgtattccgttcttggaaaacgatgactctaaccgtgctctaatgggagcgaacatgcagcgtcaggctgtgcctttgatgcagccggaagctccgatcgtcggaacgggtatggaatacgtatccggtaaagactccggtgcagccgttatttgtaaacaccctggtatcgttgaacgggtggaagcgaaaaacgtatgggtgcgccgctatgaagaaattgacggccaaaaagtaaaaggcaacctggataagtacagcttgctgaaatttgtccgctccaaccaaggtacgtgctacaaccagcgtccgatcgtcagtgtcggcgatgaagtagtcaaaggagaaatccttgctgacggaccttcaatggagcttggcgaacttgctctcggccgcaacgtaatggtcggcttcatgacatgggatggttacaactatgaggatgccatcatcatgagtgaacgccttgtgaaagatgatgtatacacatctattcacattgaagaatatgaatcagaagcacgtgatacaaagcttgggcctgaagagatcacccgcgatattccaaacgtaggggaagacgcgcttcgcaatcttgatgaccgcggaattatccgtatcggtgcggaagtcaacgacggagaccttctcgtaggtaaagtaacgcctaaaggtgtaactgagcttacggctgaagaacgccttctgcatgcgatctttggagaaaaagcgcgtgaagtccgtgatacttctctccgtgtgcctcacggcggcggcggaattatccacgacgtaaaagtcttcaaccgtgaagacggcgacgaacttcctccgggagtgaaccagcttgtacgcgtatatatcgttcagaaacgtaagatttctgaaggtgataaaatggccggacgtcacggaaacaaaggggttatctcgaagattcttcctgaagaagatatgccttaccttcctgacggcacgccgatcgatatcatgcttaacccgctgggtgtaccatcacgtatgaatatcggtcaggtattagaacttcacatgggtatggctgcccgctacctcggcattcacatcgcgtcacctgtatttgacggcgcgcgtgaagaagatgtgtgggaaacacttgaagaagcaggcatgtcaagagacgctaaaacagttctttatgacggccgtacgggagaaccgtttgacaaccgtgtatctgtcggaatcatgtacatgatcaaactggcgcacatggttgatgataaacttcatgcccgttcgacaggtccttactcacttgttacgcagcagcctctcggcggtaaagcccaattcggcggacagcgtttcggtgagatggaggtttgggcgcttgaagcttacggcgcagcttacacgcttcaagaaatcctgactgtgaagtccgatgacgtggtcggacgtgtgaaaacatatgaagccatcgtcaaaggcgacaatgttccagagcctggtgttccggaatcattcaaagtattgatcaaagagcttcaaagcttaggtatggacgtaaaaatcctttcaggcgatgaagaagaaatagaaatgagagatctagaagacgaggaagatgcgaaacaagctgacggccttgcattatcaggtgatgaagcgccggaagaaacagcatctccagacgttgaacgtgacgcagtaacgaaagaatagtctctgattgataaaggcaagtgacatcggttaatccgaagataaaaagggaggtaggccccttgctagatgtgaacaattttgagtatatgaacatcggtcttgcttcaccggataaaatccgttcatggtcttttggtgaagtgaaaaagcctgaaacgataaactatcgtacattgaaacctgaaaaggacggcctgttctgcgaacgcattttcggaccgactaaggactgggaatgtcattgcggcaagtacaagcgggttcgttataaaggcgtagtttgtgaccgttgcggagttgaagtaacgcgggctaaagtccgtcgtgagagaatggggcatattgaactggctgccccggtttctcacatttggtatttcaaaggtattccgagccgtatgggtcttgtattggatatgtcaccgcgtgcgctggaagaagttatttactttgcttcttacgtcgtaactgacccggccaatacaccgctcgaaaagaaacagcttttatctgaaaaggaataccgtgcgtatctggataagtacggaaacaaattccaagcctctatgggtgcggaagccattaataaacttctgcaggacatcgacctggtcaaagaagttgatatgttaaaagaagagctgaagacttctcagggacagcgccgtacacgtgcgatcaaacgccttgaagtgcttgaagccttccgtaattcaggaaacaagccgtcttggatgatcctcgacgtgcttccggttattccgcctgaattaagaccgatggttcagcttgacggcggacgtttcgcaacgtctgacctgaacgacctttaccgtcgtgtcatcaaccgtaataaccgtttaaaacgtctgttagacctcggcgcgccaagcatcatcgttcagaacgaaaaacgtatgcttcaggaagcagtcgacgctctgattgacaacggacgccgcggccgtccggttaccggaccgggtaaccgtccgcttaaatctctttctcacatgctgaaagggaaacaagggcgtttccgtcagaaccttctcggtaaacgtgtagactactcaggacgttccgttatcgtcgtaggtccgcatctgaaaatgtatcagtgcggtttgccgaaggaaatggcgcttgagctcttcaagcctttcgtcatgaaagagcttgttgaaaaaggccttgctcacaatatcaagagcgcaaaacgcaaaatcgaacgcgtgcagcctgaagtatgggatgtacttgaatctgtcattaaggagcatccggtcttactgaaccgtgcccctactcttcacagattaggtatccaggctttcgaaccgacgcttgttgaaggacgcgccatccgtcttcacccgttagtatgtacagcttataacgctgactttgacggtgaccaaatggcggttcacgtacctttatcagctgaggctcaagctgaggcgcgcattctgatgcttgcggcccaaaacatcttgaaccctaaagatggtaaaccggttgttacgccgtctcaggatatggtattaggaaactactacctgacgcttgagcgcgccggagcagtcggcgagggtatggttttcaaaaatacggacgaagcgcttcttgcttatcaaaacggttatgttcaccttcatacgagagtagctgttgcagcgaactcccttaagaatgtgacatttactgaagaacagcgttcaaaattgttaattacaactgtcggtaagctcgtcttcaatgaaattcttccggaatcattcccttacatgaatgaaccaacgaagagcaacattgaagagaagacacctgaccgtttcttcttagacaaaggtgctgacgtaaaagctgtgattgctgagcagccgatcaacgcaccgtttaaaaaaggcattctcggtaaaatcatcgcggaaatctttaaacgattccatatcacggaaacgtctaaaatgcttgaccgcatgaaaaacctcggtttcagatattcaacgaaagccggcatcacagtaggggtttctgatatcgtcgttctcgatgataaacaggaaatccttgaagaagcacaaagcaaagttgataatgtcctgaaacagttcagacgcggtttaatcaccgaagaagaacgttatgaaagagtcatttcaatttggagttcagcgaaagatgttatccaaggcaaactgatgaaatcattagacgaagtcaacccgatctacatgatgagtgactcaggagcccgtggtaacgcatctaactttacacagcttgcgggtatgcgcggtctgatggccaacccggctggacgaatcattgaattgccgattaaatcaagtttccgtgaaggtctgacagtattggagtactttatctccactcacggtgcgcgtaaaggtcttgccgataccgccctgaaaacagctgactcaggttaccttacacgccgtcttgttgatgttgcgcaggatgttatcattcgtgaaacagattgcggaacagaccgcggtattcttgcaaaaccgctcaaagaaggcacggaaatcatcgagcgtctggaagagcgtctgatcggacgtttcgccagaaaacagatcaaacatcctgaaacgggtgctgtgctcattaacgaaaatgaattgatcgatgaagataaagcgctggaaatcgttgaagccggaatcgaagaagtgtggatccgttccgcgttcacatgtaacactcctcatggtgtatgtaaacgatgctacggacgtaaccttgcaaccggaactgatgttgaagtcggcgaagcagtaggtattatcgccgctcaatctatcggtgagcctggaacacagttaacaatgcgtacgttccacacaggcggggttgccggagacgatatcacacaaggtcttccgcgtatccaagagcttttcgaagcgcgtaatccgaaaggtcaagcgacgatttctgaaattgacggtacaattgccgaaatcaatgaagtccgcgacaaacagcaggagattgttgttcagggcgctgttgagacacgttcatacacggcaccttacaactcacgcctgaaagtggctgagggtgatcagattacccgcggccaagtgctgacagaaggttctatcgatccgaaagaacttcttaaagtcactgacctgacaacggttcaggaatatcttctgcatgaggttcagaaggtttaccgtatgcagggggttgaaatcggcgataaacacgtagaagtaatggttcgccagatgcttcgcaaagtccgtgtgatcgatgccggagatactgatgttctccctggcacattgcttgatattcaccaatttacagaagcgaacaaaaaagtgctgcttgaaggcaatcgacctgctacaggccgtcctgtccttctcggtatcacaaaagcttcactcgagacggattcattcttgtctgccgcatcattccaagaaacaacacgcgttcttacagatgctgcgattaaaggcaagcgcgatgaacttctcggcctgaaagagaatgttatcatcggtaaactggttccggccggtaccggtatgatgaattacagaaaagtaaaacctgtttcaaacgttcagccttcggaagatatggttccggctgaataatagaaactgctgcaggaaaggctgtttcgacagcttttcctcagtattacaattattctggcgggggactgcactaaaaaatgtcatacgttgttgacatccgtcccgcagagtgataatataaccaaggtgctcgaaataaaacctgttactttggaggatatgtttatgtcttatgataaagtatcacaggccaaatcaattattattggtacgaagcaaacagtgaaagctctaaaacgaggttcagtgaaggaagtcgtcgtggcaaaagacgcggattcagttcttacggctggcgttatccagcttgcaaagaaccaaaataccgctgtctgtatggtggattccatgaaaaagctcggcaaagcctgcggaattgaagtgggagcagcagctgttgccattatgttatagcgtactttttgtttttatataagatatcattcttgtgtaaagacattgttttttgcctaatgatgaaccacctgggtatgtgggttataaaacgtaatgaagggaggaacacaacatgcctacaattaatcagctaattcgcaagggacgcgtgagcaaagttgaaaactctaagtcacctgcattaaacaaaggatacaacagctttaaaaaagagcacactaacgtatcttctccacaaaaacgcggggtatgtactcgtgtgggtacaatgacaccgaaaaaaccgaactcagcacttcgtaaatatgctcgtgttcgtttgactaacggaatcgaggttactgcctacattcctggtatcggtcacaacctgcaagagcacagcgttgtactgatccgcggcggacgtgtaaaagacttaccgggggtacgctaccacatcgttcgtggcgcgcttgatactgccggagttgaaaaccgtgcgcaaggccgttctaaatacggtacgaaacgtcctaaagcaaagtaatcaaataaatcattaaaactatgaagggaggatattcagatgccacgtaaaggtcctgtagcaaaaagagatgttttacctgatccgctttacaactctaagctggtatcccgcctgatcaacaaaatgatgatcgacggtaaaaaaggtaaatctcaaacaatcctatacaagtcattcgatatcattaaagaacgcactggcaatgatgcaatggaggttttcgaacaagcattgaaaaacatcatgcctgtacttgaagtaaaagcacgccgtgtaggtggagctaactaccaagtgcctgtagaagttcgtcctgaacgccgtacaactcttggtcttcgctggttggttaactatgcgcgtcttcgcggagaaaaaacaatggaagagcgccttgctaacgaaattcttgatgcagctaacaacactggtgctgccgttaagaaacgtgaagacactcacaagatggcagaagcgaacaaagcatttgctcactaccgctggtaggattcatataatcaaaataataattccctaataaggaaggagaaattacccaatggcaagagagttctccttagaaaaaactcgtaatatcgggatcatggctcacatcgatgccggtaaaacgactactacagaacggatcttgttctacacaggccgtatccacaaaattggcgaaactcacgaaggtgcttcgcaaatggactggatggagcaggaacaagaacgcggtatcacaatcacttctgcagcaacgactgcacagtggaaaggttaccgtgtaaacatcatcgatacaccgggacacgtagacttcacagttgaagttgaacgttcactccgtgtacttgatggtgcggttgccgtacttgatgctcaatcaggtgttgagcctcagacagaaacagtatggcgccaagcaacaacttacggagtaccgcgtgttgtatttgtcaacaaaatggacaaaatcggtgcagacttcctttactctgtaggcactttaagagaccgtcttcaagctaacgctcacgcaattcaattgccgatcggcgctgaagacaacttcgaaggtatcatcgacttagtagaaaacgttgcgtatttctacgaagatgaccttggaactcgttcagatgcgaaagaaatccctgaagagtacaaagaacaagctgaagagcttcgcagcagcctgattgaagctgtagctgagcttgatgaagagcttatggaaaagtaccttgaaggtgaagaaatcactatccctgaactgaaagctgctatccgtaaaggtacactgaatgttgaattctaccctgtacttgttggttctgctttcaaaaacaaaggtgttcagctagtacttgatgctgttcttgactaccttcctgcgccaactgatgttgctgcaatcaaaggtgtacgtcctgatacagatgaagagatcgttcgtcattcttctgatgaagagccattctctgcacttgcatttaaagttatgactgacccttatgtcggtaagctgacattcttccgcgtatattccggtacacttgattccggttcatatgtaaagaactctacaaaaggcaagcgtgagcgcgtaggacgtatccttcaaatgcacgctaacagccgtgaagagatctctactgtttacgctggagacatcgcagctgctgtaggtctaaaagatacttctactggagatactctatgtgatgagaaggatcttgtaatccttgaatcaatggaattcccagagcctgttatcgacgtagcgattgagcctaaatcaaaagctgaccaagataaaatgggtatcgctttagcgaaacttgctgaagaagatcctacattccgtacacaaacaaaccctgaaacgggtcaaacaatcatctctggtatgggtgagcttcaccttgatatcattgttgatcgtatgaagcgtgagttcaaagttgaagctaacgttggtgctcctcaagttgcgtaccgtgagacattccgtaccggtgcaaaagttgaaggtaaattcgtacgtcaatcaggcggacgcggtcagttcggtcacgtttggatcgaatttgaaccgaacgaagaaggcgctggctttgaattcgaaaacgcaatcgtcggtggtgttgttcctcgtgaatacatcccagccgtacaagcaggtcttgaagactctcttgaaaatggtgtcctagccggattcccgctaatcgacatcaaggcgaaactttttgatggatcttaccatgatgttgactcaaacgaaatggcgtttaaagtcgctgcttctatggcattgaaaaatgcagtcagcaaatgtaacccagttcttcttgaaccaatcatgaaagttgaagttgttattcctgaagaatacatgggagacatcatgggtgatgttacttctcgtcgcggacgcgtagaaggtatggaagctcgcggtaacgctcaagttgtgcgtgcgatggtacctcttgctgaaatgttcggttacgctactgcccttcgttctaacacgcaaggacgcggtacgttcacaatgttcatggatcactacgaagaagtgccgaagagcatcgctgaagaaattatcaaaaaaaataaaggcgaataattgattttgccacttaactcaagtataactactattgtaagatgaggaagtgagagcttgctttcactttctatcactctatacattactaattaaaagctcttaaggaggattttagaatggctaaagaaaaattcgaccgttccaaatcacatgccaatatcggtacaattggacacgttgaccatggtaaaacaacattaactgctgctatctcaacagtacttcataagaaatctggtaaaggtacagctatggcgtacgatcaaattgatggtgctccagaagaacgtgagcgcggtatcacaatctctactgcacacgttgagtacgaaactgacactcgtcactatgcacacgttgactgcccaggacacgctgactatgttaaaaacatgatcactggtgctgcgcaaatggacggagctatccttgtagtatctgctgctgatggcccaatgccacaaactcgtgagcacatccttctttctaaaaacgttggtgtaccatacatcgtagtattccttaacaaatgcgacatggtagacgacgaagagcttcttgagcttgttgaaatggaagttcgcgatcttcttagcgaatacgacttccctggtgatgatgtaccagttgttaaaggttctgctcttaaagctcttgaaggtgacgctgagtacgaagaaaaaattcttgaacttatggctgcagttgatgagtacatcccaactccagaacgcgacactgacaaaccattcatgatgccagttgaggacgtattctcaatcactggtcgtggtacagttgctactggccgtgtagaacgcggacaagttaaagtcggtgacgaagttgaaatcatcggtcttcaagaagaaaacagcaaaacaactgttacaggtgttgaaatgttccgtaagcttcttgactatgctgaagctggagacaacatcggtgcacttcttcgcggtgtagctcgtgaagacatccaacgtggacaagtacttgctaaaccaggtacaatcactccacacagcaaattcaaagctgaagtttacgttctttctaaagaagagggtggacgtcatactccattcttctctaactaccgtcctcagttctacttccgtacaactgacgtaactggtatcatcaatcttccagaaggcgtagaaatggttatgcctggagataacactgaaatgatcgttgaacttatctctacaatcgctatcgaagaaggaactcgtttctctattcgtgaaggcggacgtacagttggttcaggcgttgtttctacaatcactgagtaatcgactcgttcattaatgcggggtcccttatggggcctcgcttttttgtttcgccgctgattccatgtataatagaacgtatacaaattttaggagcagagcgatgaacgataacttcaagaaaaccaatcgtatttcaatgcttcagcaattgctgattaatggcagtgaacaaaccattatgattaatggtgatgacaggagtaatccgctgcttttgtttttgcacggcggtcccggcacgcctcaaatcggctatgcgagaaaataccagaataagctggaaaagcatttcaccgttgtgaactgggatcagagaggggcgggtctctcttattcaaaggaaattccgggttcatctatgactttaaatcagctgacagccgataccattcatttgaccgaacacttatgcaagcaattcagcaggcaaaaaatatatatcgccggctattcgtggggttcagttctggcgcttcatgttcttcaagagagacctgatttgtattatgcgtatatcggtatcagtcaggtggttaatattcaaaaggaagaaacggaagcttaccggctgatgatggaatggagcaggcaacggaaacatttcctgctggaaaagacgctgcgctttatcggagcgcctccatgggagaaacagctgcagcgatcgttatttctgctttgtatcgagatgaggggagggggctttacccatcatccgatcggtgctcttaaagcaggggggcgaatgctgtttggtgaaccgtacggtgtgagagggagcttcttagccgcgcggggacaaatgttcagcctgaaacacctgtgggaggatctcattttctttgatgccgggaaatcagtttcttctattataataccgtgctgttttatgtcagggagatacgatttgacggtcccggggacgacgtcttatgaatattatcagaaggttgatgcgccttataaagaatggcattggtttgagaactcagcccattcgcctcacttggaggaaccggatcgctttgccgaagttgtcagccggttcgcatcgttccatctctgaaagaaaacaggcatatccttgattaatcatggtatcacctgtataataatcaaagtgtgaaaaccacaaggttctttaaataaaccttgcaacatgcgtctattttctgtataatagtgtatgttggtctttgactgcgatgaagtgagaggttgctgacacacccggccgctttgccatggcaaggtgatcaggtttttctcacggagaactgtctaacgtgatgtaggcgaaaaggagggaaaataatggcaaaacaaaaaattcgtattcgtttaaaagcatatgatcatagaatccttgatcaatctgcagagaagattgttgaaacggcaaaacgttctggtgccagcgtatctggtccgattccgttgccaactgaaaaatcagtttacacaatccttcgtgcggtgcacaaatacaaagattctcgtgagcaatttgaaatgcgtacacataaacgtttaatcgacattgtgaacccaacaccacaaactgttgatgctctcatgcgattagacttaccatctggtgtcgatatcgaaatcaaactttaattctaaaatatagaatgatcttaataggaggtgtgacgaatgaccaaaggaatcttaggaagaaaaattggtatgacgcaagtattcgcagagaacggtgatcttatcccggtaactgttattgaagcagctccaaacgttgttcttcaaaagaaaacagctgaaaatgatggctatgaagcgatccagcttggttttgacgataagcgtgaaaagctttcaaacaaaccggaaaaaggacacgttgcaaaagcggaaactgctcctaagcgcttcgttaaagaattacgcggcgtggatatggatgcgtatgaaattggtcaggaagtcaaggttgaaattttctctgcaggagaaatcgtagatgtaacaggagtatctaaaggtaaaggtttccaaggtgcaatcaagcgccacggacaatctcgcggacctatgtctcacggttcacgctaccaccgtcgtcctggttcaatgggacctgtagatcctaaccgtgtattcaaaggtaaactattacctggacgcatgggcggagatcaaatcactgtccaaaaccttgaaatcgtaaaagtagatgctgagcgcaatcttcttttgattaaaggtaacgtacctggtgcgagaaaaactttaatcactgttaaaagtgctgttaaatctaaataagtctcttaggaaaggaggaaattgatcatgccaaaagtagcattatacaaccaaaacggttctactgctggtgatatcgaattaaacgcgtctgtatttggaattgagccaaatgagagcgtagtattcgacgctattcttatgcaaagagcttccttacgtcaaggatctcacaaagtaaaaaatcgttctgaagtacgcggcggaggtcgcaaaccatggcgtcaaaaaggtacaggtcgtgcccgtcaaggttcaatccgttcaccgcaatggcgcggaggtggtgtcgtattcggcccaacaccacgcagctattcttacaaattacctaaaaaagttcgccgcttggcaatcaaatcagtattgtcttctaaagtgaacgacaacaacattattgttcttgaagatcttactcttgatacggttaaaacaaaagaaatggcagctatccttaaaggattatctgttgagaaaaaagctttaatcgtaactgcggatgcaaacgaagcagtatctctttctgcacgcaacatccctggagttacagttgttcaagctaacggaatcaacgtgttagacgttgtcaaccacgagaagcttctgattacaaaagctgcggttgaaaaagtagaggaggtgcttgcataatgaaagatcctcgtgatgttcttaagcgccccgtcattactgaacgttctgctgatttaatgactgaaaaaaaatatacttttgaagttgatgtaagagctaataaaacagaagtgaaagatgcagttgaaagtatctttggagtgaaagttgacaaagtcaacatcatgaactacaaagggaaatcaaaacgtgtcggccgctacactggtatgactagccgtcgcagaaaagcgatcgtaaaacttactgcagacagcaaagaaatcgaaatttttgaagcttaattatctgtaaaaagaaggagggaaattcaaaatggcgattaaaaagtataaaccgacctctaacggacgtcgtggcatgacaacttcagattttgctgaaatcacgactgaccagccggaaaaatccttgcttgctccccttcacaaaaaaggcggacgtaacaaccaaggtaaattgactgtacgtcaccaaggtggcggacacaaacgccaataccgtgttatcgacttcaaacgcgataaagatggtatacctggacgcgttgctacagttgagtacgatccaaaccgttcagctaacattgcactaatcaactatgtagacggagaaaaacgttacattcttgcaccaaaaggaattcaagtaggtactgaaatcatgtccggccctgaagctgacatcaaagtaggtaacgcacttccgcttatcaacatccctgttggtacagttgtgcataacattgaattaaaacctggtaaaggcggacagcttgtacgttcagctggtacatctgctcaggttcttggtaaagaaggcaaatacgttcttgtacgtcttaactctggtgaagttcgcatgatcctttctgcttgccgcgcttctatcggtcaagtaggtaacgagcagcacgaacttatcaacgttggtaaagcaggacgctctcgctggaaaggcattcgccctacagtccgcggttctgtaatgaaccctaacgatcacccgcacggtggtggtgaaggtcgcgcgccaatcggacgtaaatcaccaatgtctccttggggcaaaccgactcttggattcaagacacgtaagaaaaagaacaaatctgataaatttatcgtacgtcgtcgtaaaaataaataacggggttgtctacggttcatttcggaccgtagtgcaatcacgaagggaggttccaaaatggctcgcagcttgaaaaaaggaccatttgtcgatggacacttgatgacaaaaatcgagaaattaaatgaaacggacaagaaacaagttgtaaaaacttggtctcgccgttcaactattttcccacaatttatcggtcacactatcgcagtatatgacggacgtaaacacgtgcctgtattcatttctgaagacatggtaggccacaagttgggcgaattcgcaccgactcgtacttacaaaggccacgccagtgacgataaaaaaacaagacgctaagagaggaggcttttaaatgcaagctaaagctgttgcaagaacagtccgtattgctcctcgtaaagcacgtctagtaatggacctgattcgaggtaagcaagtaggcgaagcagtatctatcctgaacttaactccgagagctgcttctccgatcatcgaaaaagttttaaaatctgctatcgcaaatgctgagcacaactacgagatggacgctaacaatctggttatttctcaggcatttgttgacgaaggcccaacgttaaaaagattccgcccgcgtgctatgggacgtgcgagccaaatcaacaaacgtacgagccacattacaatcgttgtatcagaaaagaaggagggataagtagtgggtcaaaaggtaaatccagtcggtcttcgtatcggagtcattcgtgattgggaatctaagtggtacgctggtaaagattacgctgacttcctgcacgaagatttaaaaattcgtgaattcattagcaaacgcctttctgacgcttctgtttctaaagtagaaatcgagcgcgcagcaaaccgcgttaacattacgatccacactgctaagcctggtatggtaatcggtaaaggcggatctgaagttgaagcacttcgtaaagcccttaacagccttactggcaagcgtgtacacattaacattcttgaaatcaaaagagcagatcttgatgctcagcttgtagctgacaacatcgctcgtcaactagaaaaccgtatttctttccgccgtgcgcagaaacaacaaatccaacgcactatgcgtgctggagcacaaggtgtgaaaacaatggtttccggtcgtcttggcggagctgacattgctcgttctgaatactacagtgaaggaactgttccattgcacactttacgtgctgacatcgactatgcaacatctgaagctgacacaacttacggtaagcttggtgtaaaagtctggatctatcgtggagaggttcttcctactaagaagaaaactgaggaaggaggaaaataatatgttattaccaaaacgcgttaaatatcgcagagagcatcgcggaaaaatgcgcggtcgcgctaaaggcggtactgaagtacattttggtgagtacggtatccaggctcttgaagcttcttggatcacgaaccgccaaatcgaagctgcacgtattgcgatgactcgttacatgaaacgtggcggtaaagtttggattaaaattttcccttcaaaaccttacactgctaaaccgcttgaggtacggatgggttccggtaaaggggctcctgaaggctgggtagctgttgtaaaaccgggcaaagttttatttgagatttctggtgtgtctgaagaggtagctcgtgaagctcttcgtcttgcatctcacaaattgccaattaaaacgaagttcgtaaaacgtgaagaaattggtggtgaatcaaatgaaagctaatgaaattcgtgaccttaccactgctgaaattgaacaaaaagtaaagtctcttaaagaagaacttttcaatcttcgctttcaattagcgacaggacaacttgaaaatactgctcgcattcgtgaagtgcgcaaagctatcgcgcgcatgaaaactgtgattcgtgaaagagaaattgctgccaacaaataatcactgaggggaggtcgtgagcatgagcgaacgtaaccaacgcaaagtttaccaaggccgtgttgtttctgacaaaatggataaaaccatcactgttgttgttgaaacatacaaaaaggatcctatttacggtaaacgcgtaaaatactcgaagaaattcaaagcacatgatgaaaataaccaagctaaaatcggagacatcgtaaagatcatggaaactcgtccattatctgcaactaagcgttttcgtctagtagaagttgtcgaagaagctgttattatctaataaagttcggaattctttttccgaagggaggtaacaaataatgattcaacaagagactcgtttaaaagttgctgacaactccggtgcgcgtgaggtacttactattaaagttcttggcggttctggacgtaaaacggctaacattggtgatgtaattgtttgcacggttaaacaagcaacaccaggaggcgttgtcaaaaaaggtgaagtcgtaagagctgttatcgttcgcacaaaaagcggagcacgcagaactgacggatcatacatcagcttcgatgagaatgcatgtgttatcatccgtgacgacaagagcccgcgtggaactcgtatcttcggaccggttgcccgtgaattacgtgaaaacaacttcatgaaaattgtttctctggctccagaagttatctaatgaaataaatgccttactcaaggaggtgcgatcaggatgcatgtgaaaaaaggcgataaagtaatggttatctctggtaaagataaaggcaaacaaggtacaatccttgctgctttccctaaaaaggaccgcgttctagttgagggtgtaaacatggtgaagaagcactctaaaccaactcaagcaaaccctcaaggcggtatttctaatcaagaggcgccaattcatgtatcaaacgttatgccgctcgatcctaaaacaggtgaagtgactcgcgtaggatacaaagtggaagatggcaaaaaagttcgtgttgcaaaaaaatctgggcaagtcttagataaatagtatttaaaggaagggaggtctatctcatgaaccgccttaaagaaaagtacaataaagaaatttcacctgctttaatgacgaagttcaactacgactctgttatgcaggtgccaaaaatcgaaaaaatcgtaatcaacatgggtgttggtgatgctgttcaaaacgcgaaagcaatcgacagtgctgttgaagaattaacgtttatcgcaggtcaaaaacctgtcgttactcgtgcgaagaaatcaattgctggattccgtcttcgtgagggaatgcctatcggtgcgaaagtaactcttcgcggagagcgcatgtatgatttccttgataaacttatttctgtatctttaccgcgtgtacgtgacttccgcgggatttctaagaaatctttcgacggtcgcggaaactacactcttggtatcaaagaacagttaatcttccctgaaattgactacgataaagtaacaaaggttcgcggaatggacatcgttattgtaacgactgctaactctgacgaagaggctcgtgagctattaactcaagtaggtatgccgttccagaaataatcaatgaaagggaggcgaaatcgtggctaaaaagtcaatgattgcgaaacaacaacgtacaccaaagtttaaagtgcaagagtacactcgctgtgaacgctgcggacgtccgcactcagtcattcgtaaatttaaactttgccgtatttgtttccgtgagcttgcatataaaggacaaattcctggcgtgaaaaaagccagctggtaatccccaagaatgggaaggaggtaattatataatggttatgacagatccaattgcagatatgctgactcgtattcgcaatgcaaacatggtacgtcatgagaagcttgaaattcctgcttctaaattgaaaagagaaattgctgacattttaaagcgtgaaggtttcattcgtgacgttgagttcgtagaagacagcaaacaaggtatcatccgcgttttcttgaaatacggacaaaacaacgagcgcgttatcactggtcttaaaagaatcagcaaaccaggtttgcgtgtatacgctaaatcaaatgaagtacctcgcgtacttaacggtcttggaatcgcgattatttctacatcacaaggtgttttaacggacaaagaagcccgtgcaaaacaagctggtggagaagttctagcatacgtttggtaagaagtttaacaagaatggaggtgttttagtatgtctcgtgtaggaaaaaaactgcttgagatcccttctggagttacagtaacgctgaacgaaggcaacactgtagctgtaaaaggaccaaaaggagaattaactcgtactttccatcctgatatggaaatcaaaattgaggacaacgtgcttacagttactcgtccttctgatcacaaagagcaccgtgcgctgcatggtacgactcgcagtctgcttggaaacatggttgaaggcgtatctaaaggatttgaaagaggtttggaattagtcggtgtcggttatcgtgcggctaaatccggaaacaaacttgttttaaacgttggatactctcatcctgttgagattgttcctgaagagggcatcgaaatcgaagttccttctcaaactaaagtagttgtaaaaggtacagacaaagagcgtgtaggagctatcgctgctaacatccgcgctgtacgttctccagagccttacaaaggtaaaggaatccgctacgaaggtgaagttgttcgccgtaaagaaggtaaatctgctaagtaagaccgcttaaagtgaagaaaggagtgacctaaggatgattacgaaaactagcaaaaatgctgctcgtcaaaaaagacatgcccgtgttcgtgctaaactttcaggcacagctgaaagacctcgtctgaatgtgttccgttcaaacaaacacatttatgctcaaatcatcgatgatgtaaatggcgttacacttgctagtgcctctactctcgataaagatttgaacgtggaaagcactggtgacagcgctgctgctgctaaagtcggtgaactcgttgcgaaacgcgcttctgagaaaggtgtttctgacgtagtatttgaccgcggcggatacttataccatggacgtgtaaaagctctggccgatgcagctcgtgaagccggactgaaattttaataaaaaaaggagggacacatgattatgcgtcgtattgacccaagcaaattagagttagaagaacgcttagttacggttaaccgcgtagcgaaagttgttaaaggtggtcgtcgtttccgtttcgcagctctagtcgttgtcggtgacaaaaacggtcacgtaggtttcggtactggtaaagcacaagaagtacctgaagcaatccgcaaagctgttgaagatgcgaaaaagaatttgattgaagtaccaatggttggaactacgattccacacgaaatcatcggacgtttcggtgcaggcaatatcttgttgaaacctgcttctgaaggtactggagttatcgctggaggccctgtacgtgcggtacttgagcttgctggcgttgctgatatcctttctaagtctttaggttctaacacaccgatcaacatgatccgtgcaacacttcaaggtttaagtgagcttaaacgtgccgaagacgttgcgaagcttcgtggaaaatctgtagaagaactgttaggataaggagggaacattaatggctaaattagaaattaccctcaaacgcagtgtaatcggtcgcccggaagatcagcgcgttactgtaagaacacttggtttaaagaaaacaaaccaaactgtcgttcatgaagataacgctgcgatccgcggtatgattaataaagtatctcatctagtttctgttaaagaacaataaaaataaattataggctaaggaggtgtcctaatgaaacttcatgaattaaagccttcagaaggttcacgtaaagtacgcaatcgcgtaggtcgtggtattggttctggtaacggtaaaacagctggtaaaggtcacaaaggtcaaaacgctcgttctggcggcggtgtacgccctggattcgaggggggacaaatgcctttattccaacgtcttcctaaacgcggttttacaaacatcaaccgtaaggattacgctattgtgaacgtagacaaattgaacggttttgcggaaggaacggaagtcactcctgaacttcttcttgagactggtgttattagcaaacttaatgcaggagtaaagattcttggcaacggtaaattagagaaaaaattaactgtaaaagccaataaattctctgcttctgcgaaagaagctgttgaagctgctggcggtacagctgaggtgatctaacttgtttaagacaatctccaactttatgcgtgtgagtgatattcggaataaaatcatttttacattactcatgcttatcgtctttcgcataggtgcgtttatccctgtgccatatgtaaatgctcaggcgttgcagacacaaagttcgatgggggtttttgatctccttaatacatttggcggcggtgcgctttatcagttctccatttttgcgatgggaattacgccttacatcactgcttcgatcatcattcagctgcttcagatggatgttgtgccgaagtttaccgagtggtctaagcaaggtgaagtcggccgccgtaaattagctcagttcacgagatattttacgattgtgcttggttttatccaggcattaggtatgtcttacgggtttaacaacctggcaaacggtatgctgattgagaaatccggcatatcgacatatctgattattgctttagtactcactggaggaactgcttttttaatgtggctgggagaacaaattacttccaatggagtaggtaacggaatttcgatcatcatcttcgcggggattgtggctagtattccgaaaactgttgggcagatttatgagactcaatttgtcggcagcagcgatcagctgtttattcatattgtaaaaatcgctttactggtgattgcgattttggccgttattgttggtgttatattcattcagcaggccgtacgcaaaatcgcgattcaatatgcaaaagggcaaggtcgttcacctgttggcggaggccagtcaactcaccttccgcttaaagtgaatccggcaggggttattccggtaatctttgcggttgcgtttcttattacgccgcgtactatcgcgtcatttttcggagaaaacaatgtgacaaagtggattcaagccaactttgacaatacacatccggtgggcatggcggtttatgtcgcattaattatcgcctttacgtacttctatgcttttgtgcaggtaaaccctgaacaaatggctgataacctaaaaaaacagggtggctatatcccgggggttcgtccagggaaaatgactcaagatagaattacgagcattttgtatcgacttacgtttgtgggttctatattcttagccgtgatttccattcttcctatctttttcattcaattcgctggattgcctcaaagtgcacagattggcggaacatcattgttaattgtcgtcggggtagccttggagacaatgaagcagctggagagccagttagtgaaacgtaattaccgaggatttatgaaaaattagaggactggttttaaccattcctctaaataagagaggacgggggaaatccgaatgaacttagtcttaatgggacttcctggagccggtaaaggcacacagggagaacgaattgttgaggattatgggatacctcatatctcaacgggagatatgttccgtgctgctatgaaagaagaaacaccactcggactcgaagcaaagtcttatattgataaaggcgagctcgtaccggacgaagtcacaatcggcattgtcaaagaaagactcggcaaagatgattgtgaaagaggttttcttctggacggatttccgcgaacagtcgctcaggctgaagctcttgaaaacattcttgaggaatacggcaagccgattgattatgtcattaacattaaagtagacaaagactctttaatggaacgtttgactggacgcagaatttgcagtgtttgcggcacaacctaccatttggttttcaatccgccgaaaacgccgggtgtttgtgataaagacggaggagacctttatcaacgggcagatgataatgaggaaaccgtctcaaaacggcttgaggtcaacatgaagcagactcagcctttactcgatttttattctgagaaagggtatcttgtcaacgtcaatggccagcaggacattaacgacgtgtacaaagatgtgaaagagcttcttggaggattgagcaaatgattatctgtaagacccctcgtgagcttggcatcatgcgggaagcagggcgaatcgtggctttgactcatgaagagatgaaaaagcacattaaaccaggaatctcgacaaaagaattggatcaaattgccgaacgttttattgagaagcagggtgcaatcccatcttttaaggggtataatgggtttcgcgggagcatctgtgtatcagttaatgaagaactcgttcacggaattcccggtaaaagggttttgcgtgacggtgacattatcagcattgatatcggtgctaaattaaatggttatcatggtgactctgcttggacatatccggtaggaaacatcagtgatgatgataaacgactgctggaagtgacagaggagtctttatataaaggcttgaaggaagcaaaaccaggtgaacgtttgtcgaatatttcccacgcaatacaaacgtatgtcgaaaatgagcagttttcagttgttagggagtatgtcggacatggtgttggtcaagacttgcatgaggatccgcaaattcctcattacggtccgccaaacaaaggacctaggctgaagcctggtatggttctcgctatagaaccgatggttaacgctggcagccggtatgtgaaaacattggctgacaactggacggttgtaacggtagatgggaaaaagtgtgctcattttgaacatacgattgcgattacggaaacgggttttgatatactgacaaaagtctagatgatgaaatgaattccttgacacatgtttttcattccgcacctgggcagattgtaggtttacaattggtcggaagaaaaaccggctagctgctgtcatcggaatgaagattcatcatcgtgtactaaagcagacggagaaagcgtacatttcattctccttagaaaaagaatatcaatcattcaccctttatgattgcgtatctccggaagttcagaacagtataaacgaaacagggcgtgtgacaaacggataactgagattttctcttttgaaatttgtcagagagcaagttactgatttgaagaagggagaacacttgaatggcgaaagacgatgtaattgaagtggaaggtacgattgtcgaaacactgccaaacgcgatgttcaaagttgaactcgaaaatggccatacggttttggctcacgtatctggtaaaatccgcatgcacttcattcgcattttacctggagacaaagttacggtagaattatctccatatgacttaactcgtggcaggattacgtaccgttacaaataaagcactccggaaactgaaggaggttggaaacacatgaaagtgagaccatcagttaaaccaatctgcgaaaaatgtaaagttattcgcagaaaaggaaaagtaatggtgatctgtgaaaatccaaagcataaacaaaaacaaggataattaataaggaggtgcccagagaatggctcgtattgctggtgtagatatcccacgtgacaaacgtgttgttatttctttaacatatgtcttcggaattggccgcacaacggctcagcaagtcttgaaagaggctggtgtttctgaagatactcgtgtgcgtgatcttactgaagaagaacttggtaaaatccgtgatgttattgacaaactgaaagtagaaggtgaccttcgccgtgaagtttctcttaacatcaagcgtctgatcgaaatcggaagctaccgcggaatccgccatcgcagaggtttgcctgttcgcggacaaaactctaaaaacaatgcgcgtactcgtaaaggtccgcgtcgtactgtagctaacaagaaaaaataagtaagtaagggaggtacctaaacaatggctgctgctcgtaaacaaaacacgcgtaaacgtcgcgtgaaaaagaatattgagtcaggaatcgctcatattcgttcaactttcaataacacgatcgttacgatcactgatactcatggtaatgctatttcttggtcaagtgccggagctctaggattcagaggttctcgtaaatctactccttttgctgcgcaaatggctgctgaaacagctgctaaaggttcaatcgaacacggacttaaaactcttgaagtaactgttaaaggaccaggttctggccgtgaagctgcaatccgtgctttacaagctgccgggcttgaagttacagctatcagagacgtaactcctgttcctcataatggatgccgtccaccaaaacgtcgccgcgtgtaatttgtttgtatagattttgtgtccctgtcaataatgggttatgatacagttatttatgaaacgaatgcaccgactcgttgcctgagcacatacgggactaaacaatggggaatttcggatggaatctcatatgattctattcgaggtttcgacgttttgaaggagggttttaagtaatgatcgagattgaaaaaccaaaaatcgaaacggttgaaatcagcgacgatgccaaatttggtaagtttgtcgtagagccgcttgagcgtggatatggtacaactctgggtaactccttacgtcgtatcctcttatcctcactccctggtgccgctgtaacatcgatccagatagatggtgtactgcacgaattctcgacaatcgaaggcgttgtggaagatgttacaacgataatcttgcacattaaaaagcttgcattgaaaatctactctgatgaagagaagacgcttgaaattgatgtacagggcgaaggaactgtcacagcagctgatattacacacgacagcgatgttgaaatccttaatccggatcttcatatcgcgactcttggtgagaatgcgagtttccgagttcgccttactgcacaaagaggacgtgggtatacacctgctgattcgaacaaaagagacgatcagccaatcggcgtgattccgatcgattcaatctttacgccagtttctcgtttatcttatcaggtagaaaacactcgtgtaggccaggttgcaaactatgacaaacttacacttgatgtttggactgacggaagcactggaccgaaggaagcaattgcgctcggttcaaagattttaactgaacaccttaatatattcgtcggtttaactgacgaagctcagcatgctgaaatcatggttgaaaaagaagaggatcaaaaagagaaagttcttgaaatgacgattgaggaacttgatctttctgtccggtcttacaactgcttgaagcgtgcgggcattaacacggttcaagaacttgcgaacaagacggaagaagatatgatgaaagttcgcaacctgggacgcaaatcacttgaagaagtgaaagcgaaacttgaagaacttggactcggccttcgcaaagacgattgatctagtttccatgtgaactaggattttcgtgtgttttttatttagaaacagcattccattaaaggaggggacatcacatgtcatacagaaaactaggacgtacgagttcacagcgtaaagctatgcttcgtgatcttacaacagatttgatcatcaacgaaagaattgaaacaactgaaacacgtgcgaaagaacttcgctctgttgttgaaaagatgatcactcttggtaagcgcggtgacttgcatgctcgtcgtcaagctgctgcatacattcgcaacgaggttgctaatgaggaaaataaccaagatgcacttcaaaaattgttctctgacattgcaactcgttacgaggagcgccaaggcggatacacacgtattatgaagcttggtcctcgccgtggtgacggtgcaccaatggcaatcatcgaattggtttaatcacatatttttgtgtatctaaagaagggcgggacagtttctaactggatctatgccctttttttagatatcagaactttttatcatgagacagacaagcagagctatagctgagaggaggccaggcgcccgtggatcaaaaacagcttatatccgtaaaagacattctattccgataccgcaaagatgcggaaagaccggcgctggacggtgtgagtctggaggtatacgaaggagaatggcttgctatcgtaggccacaacggttcagggaagtcgactttggccagagcgctgaacggactgattttgcctgaggccggagaaattgaagtcggcggcatcaagctgactgaggataccgtgtgggatgtgcgaaaaaaaatagggatggtctttcagaatcccgataaccaatttgtcggaacgactgttcgcgatgatgtggcttttggtttagaaaacaatggtgttccgcgcgaagaaatgattgagagagtagtttgggctgtcacacaagtcaatatgcaggattttcttgatcaagagccgcaccatctctccggaggtcaaaaacaaagagtggcgatcgcaggaattattgccgcgcgtcctgatattatgattttggatgaagcgacatccatgcttgacccgattgggagagaagaagtccttgatactgtcagacgcttaaaagatcagggcatggccaccgtcatttcgataacacatgatctggaagaagccgcaagggcggacaggatcattgtgatgaacggcggcaggaaatatgcagagggcacgcctgaagagatttttaaattaaacgaagacttggttcgcatcggtcttgatttgcctttctcattccagctcagcctgcttttgaaagaaagcggactggcgttaacgaaaaaccatctgactcaggaagggctggtgaatgagctgtggacattaaaatcaaagatgtagaacaccgctatcaaatgaagacaccgtttgaacggcttgctctgtatgatatcaatgccgtaataaaagagggcagctacgttgccgtcatcgggcatacagggtcgggcaaatcgacgctcctgcagcatttaaacggtttgctgaaaccgactaaaggacagcttgaactcgggagcacgattctggcagccggtaaaaagaataaagaccttaagactttacgaaaaaaagtcggaatcgttttccaatttcccgaacatcagctgtttgaagagactgtgctgaaggacatcgcattcggaccgatgaatttcggtgtaaaaaaagaagacgctgaacggaaagccaaagaaatgctggggcttgtgggccttccggaagacattttggatcgttcaccatttgagctcagcggcggccagatgcgcagagtggcgattgccggcgttctcgcgatggagccggaagtgctggttttggatgaaccgacggccggtcttgatccgagagggcgccaggacattatggacatgttctatgcgcttcatcagcggggaaacctgacaaccgttctcgtcacccacagcatggaggacgccgcccgttatgccgacgagatgatcgtcatgcacaaaggaaccattaaagcgacggggagtccgcgtgacttgtttgtaaaaggtgaagagatgtccgaaatgggcctggatcttcctgaatcggtgaagtttcagagacggcttgagaaggctctcggcgtcaagtatgagaaacccatgctgaccctgcaggatgccgccagtgaaattaaggctttctttcaggaggaaaaggaccaatgatggacagcatgattatcggaaagtatgttcccggatcatcgcttattcaccgattggacccgcgaacaaaacttgtcagcatctttctttttgtatgtattgtttttttggcaaacaacgtacagacgtacgctttactcgggttgtttacattcggggtgattgccttaacacgagtgccgttcagctttttgctgaaggggcttaagccgattatctggattgtggcgtttacctttttattacacattttcatgacgcatgaaggatctgtcatttttcagcttggctggtttaaagtgtatgagggcggacttatacagggtatttttatctccctccgtttcgtttaccttatctttatgacgacgctgctgacgctgacaacaacgccgattgaaataacagatggaatggagcagctgctgaacccttttaaaaaggtgaagctgcccgtacacgaactcgcattgatgatgtcgatatcattgcgatttatcccgacattgatggaagagacagataaaatcatgaaggcgcaaatggcgaggggtgcggactttacaagcggcccggtgaaagacagaatcaaagcggttgttccgctgcttgtcccgctgtttgtcagcgcctttaaacgcgcagaagagctcgcggtcgccatggaggcgagaggctaccagggcggtgaggggagaacgaaatacagaaagcttgtctggaccggaaaggataccggagctattctgctcatcatggtattagccgtgttattgtttttcttaagaagttagaggtgctgctgaatgagagtgaaatgtaccattgcttatgacgggcatttatttaacgggtatcaggttcagcctggaaagcggaccgttcaaagtgaattggaaaaagcgctggccgtcatccataaaacggacggcagagtgcctgtttactcatccggccgcacggacagcgatgttcatgctgccgggcaggtcattcattttgatacgccgctgtccatcccggctgagaaatggccgtttgcgctcaatgccctgctgcctgatgatattgccgtcaaaacagcagagattgcggatgatgggttccatgcacgatttagcgcggtccaaaaggaatatcgctacattgtatatacggagaaacacccggacgtatttaaacgacattacgcttaccattttgcatatccgcttaatgtgcagaaaatgagggaagcttcaaggcacctcatcgggacacatgatttcacaagcttttgcgcggctgataccgcggttcaggataaggtcagaacgatttacgagctggattggactgagaccggagacggcctgcagatgcggatcaccggtaacggttttctctataatatggtcagaatcattgccggaacgttattggatacaggagctggaaaattttctcccgatgatgtaaaagcaatgctcgaagcgaaagatcgcgaagccgcggggcgcaccgcaccggggcacgggctgtatttatggagcgtttgctatgacaactaaaccaggtgtaacattttcttgacagagtctgcataaagttataagatatcatatggtatgtatttcaaccccacgataagccccggaacttattgtgttgtgaaatagaacgtaatcgaagattattgaaaatgacagatcatttaggagggaaattcaatgcgtacaacacctatggctaacgcaagtactattgaacgcaagtggttagttgttgatgcagctggcaagactttaggacgtctttctacagaagttgcatctatccttcgcgggaaacacaaaccgacttacacaccgcacgttgatactggagatcatgtgatcatcatcaacgctgaaaaaatcgagttaactggtaaaaagttaactgacaaaatctactaccgtcacactcaacatccaggcggattaaaatcaagaactgctcttgaaatgcgtacaaactaccctgagaaaatgcttgagcttgctatcaaaggcatgcttccaaaaggttctctaggtcgtcaaatgttcaaaaaattgaacgtataccgtggttctgagcatccacatgaagcacaaaaacctgaagtttacgaacttcgcggttaattaaaaaggaggttaccaatttggcacaggttcaatattacggtactggccgtcgtaaaagttctgtagcgcgtgtgcgcttagttccaggagaaggtcgtatcgtcgttaataatcgtgaaatcagcgagcacattccatctccagctctaatcgaagatatcaaacaaccattaactttaactgaaacagctggtacttatgatgttttagtaaacgtacatggaggcggcttatctggtcaagctggagcaatccgtcatggtatcgctcgtgctttgcttgaagcagatccagaataccgtgcaacacttaaacgtgctggtcttctgactcgtgacgctcgtatgaaagaacgtaaaaaatacggtcttaaaggcgctcgtcgtgcacctcagttctcaaaacgttaatcgttttggatggcaaaaaccacaacttcttggttgtggtttttttgtatttttttctcatattcaagaggttatccgatgtttttctagaattgtttgttatactctattcattaccaataaggagcgcagttataatgaataagttagtcatacataacagcaaggcatgggataaaaaagtcgaaacaggcaatgaatggacggttgcggttgattctcatacgattggtgaagcgaaaaaaggcaattggagcatcagaatgacccccggaaaagatgtgccggcggattggtttccgcccatagacggtctgaaggttctttgtctcgcttcaggaggaggacagcaagggccggtccttgctgctgcaggagcggacgtgaccatctttgacaattcggaaaaacagcttgcgcaagacagaatggttgccgagcgggacgatcttacgcttcggactgtcaaaggcagcatgaatgatctgagctgttttgatgatgagtcatttgattttatcgtgcacccggtatcgaattgctttgttgatacggttcttccggtatggaaagaagctcatcgcgtattgaaaaaaggcgggtctttagtctccggttttgtaaatcccgtcgtgttcttatttgatatggatttagagcaggaaggtgtactcaaagtaaagtattccattccgttttcggatgaaaaagacctgagtaagaaaaaggtaaaggaacttattgataatcatgaagcgcttgaattcggccatacgctggaggatcaaattaaaggtcagattgacgcaggcttcatggttgccggtttttacgaggacaaaggcggcctcgtgctggatgaatacattaatacatactccgtaacaagaagcattaaaatataaaaacggcatcccgtcagaggtgctgtttttttgcggctttttcctgcggacggctgatcacattagccgaaaccggttctattccaatttctctggcccaaaccgacagttgtcccatatggtgaatctcatgcgcaaggatgtggcggagaatatcttctttaggaaaggtttggtccatccagtccggcttaacaagatccggtcctttgagggagaccgcatgaatgacatcctcccgatgctgttcagacagctttctgagatcctgaatgctcgtatagtcagactcagcaggtaaaacatcatctttacctaaaatggcacgagcccagctgatctcgacatcaatgatatgaaataaagtccgcaagatgctctccattccgcccgtccgggttttcgtcagttcctcccggctcagcttttcacatatcataaaccactcgtcacgcaccgtccaattgtattgaaacagctttttcatcacgtcacctcagctctttattcttccagttaacataaaactccttcatttgggaggatttccactatcaacaaagcatgctttttcccttttcctttcaaaataacagtaaaaaggagcgtggctggcaatggcagaagtattatctttttcagacgtgaaacggcagaaggattttgagcttgagaagagtttactaaaggagctgtcactgacgcagatcattcagtccgtaaaagcatgtcttacccctttgtttccctttcttcaagacgaacacggcattctgagtgaaggatgcatagattttgcaattgaagcgtatttattaggcggcaggttcggcgtctttggctattatggtgagtctttgcagagggcaaacgcccgttcggctgaggaagaggaagaactgacggtcgatttttttgaatatctttgcaattggacgcatgagcaatattcttccgttaaacaaaaagaaatctatgaagcgtcctgccggtttatcaacagctggtggacggaaggatttctgcaaagagaaaaacaatgtaagctccgcatgaggtaatcataatttcttcccttgtcccatacttattaataacggggacaagcgggagggaaaggtatgacaaaaaagctgaaatggctcggttttttacttggctttatcatattattgtgtttattccggtttcaattccaaaatgatgattcttggcggccgtggagtctgcctctgagcgggaaaatcatctatctcgatccgggacacggcgggccggacggaggcgccacgggaggcagtcaccttgaaaaggacattactctcgaagtggcctccagggtaagagactatttgcaggagcagggagctttggtcattatgacgcgggagacggatactgatttagctcctgaagggacgaaaggctacagcagacgcaaagcggaagatctgagaaagcgcgtggaaatcatcaaccgttcagaggcggagctttatatcagcattcatctgaacgccataccgtcaccgagatggagcggcgcccaaagcttctactatggaaaatacgaagaaaatgaaaaagtggcaaaatatatacaggacgaattgagaatcaatttggagaatacaacgagaaaggcgaaacggatacacggcatttacttaatgcagaatgtaaccaaaccgggcgcgctggtggaaatcggatttctgtccaatcccgcggaagcgaaaaggctcggccagcccaaatatcaggacaaaatcgcttcttccgtgtataagggcgtattgagatattttacagagaaaggagaccctcccgagtaaggagggtttttcgccgattctatgtttaatatatggtataataccatttgtaaacgaatacacaaagggtgagggttcgatgataagagaagatgaagtaagaaatatagtcggaaacatgcgcgaaccttttcttcatagaccgctgggagaattggatgccattaaagaagtaaagatcaagccggaaaaacggcatgtcagtgtaaaaattgcattggcaaaaacggggacggctgaacagatgggtattcagcaggaaatcgtatccgttctgaaagaagcgggtgcggaaactgtgggactgcggtttgaagagctgccggaagaaacattggcaaaattcagccggccggctgctgaaagcgaaaccctgctgaataggaaacacccgccggtctttcttgcggtggcaagcggaaaaggcggtgtcggcaaatcaacggtttccgtcaacctggccatttctcttgcgcggctcggaaaaaaagtcggcttgattgacgcggatatatacggattcagcgtgccggacatgatgggtattacagttcgcccgacagtagaaggagaaaaactgcttcctgtcgaaagatttggagtaaaggttatgtcgatgggctttttcgtcgaagaaaacgctccggttgtgtggagagggccgatgctgggcaagatgctgaataacttcttccatgaagttgactggggagaggttgactatatcgttcttgatctgccgcccggcacgggtgatgtggcgcttgatgtacacacgatgcttccgagctgcaaagagattatcgtatcaacgccgcaccctacagccgcatttgtagcggcgagagcgggttctatggcgattaagaccgatcatgaagttgtaggggtcattgaaaatatggcttactatgaaagtgcaaaaaccggcgagagagaatatgtgttcggtcaaggtgggggagataagcttgcagaggaattgcaagtgccgctgcttggcagaattcctttaaaacagcctgattgggacaaggatcaatttgcgccttctgtctatgacagaagtcatccgatcgggaaaatttatatggggatcgcccagaaagtcattgaaaaaacagctgaataaaaaaggggccgggatcaacacggcccggccttttattggctttctttttcagagcttgaagccgcttttttcaattcatcctcgaattgctttttgaaaagcgggctggaaagtgtctctgtaattacatcttctaagtaactgcggaatttttggcttttcaccagctcatagtattttttatccatgccggggtcctgcatgatctgcataaaacttttctgataatcagggtctttcatcagtttttttatgattttttcatgctcgggctgaagagtttttgcaaagctctcggcgaactttgagtcttcaaagatggttttccagaactccgccccttttttagaggtgagggttttctctattgtgcctttaatggcattttgatcaatcaccaatgcctcattcatcgcatcatcatttaatatttccttaattgctttttttccatcatcggtctttaatatatcaacaaccatttttttagtctggtcataatccatatccgctgcttggtcttttggagcacaagctgttacagataatacaacaaaacagcttatcaatagcgttttggcttttgacatgcataagctccttccttacttgtacttatttttaatatgattcatcggaatggatttatacataacaaaatatcgctgaacgcgattgtcagggggatgaataagagatgaaaagccgcgggcttgttcgatttttcttttcgattttagctgtgggcgctcttattacaagcgtcgtgggatttgctctgaagtggggggagtacaaggggttctttctgaattttgaggccggtcagattttctccgttctgatctggtttatcggggtaggcatgattttcagtgtgatcagccagatgggattcttcgtttttctgacggtgcaccggtttgcccttgaaattctcagatcaagctcgctttggaatctgcttcagctgtttatcattctgtttgtcgcttttgatttaatgtacgtcagatttttgtttttcggagagcgggatgactcgattgcggggtttgtctggctgccgctggctctgcttgccgtcggcctgttgacggcgtatataaaacaaaagcagtcctcaaaaaatacgttcgtttcatcattatttttaatggtcgttattacagcgcttgaatgggttcctgcgctacgagtgaataatgaggactggctttatttgatgctgattccgctgatgggctgcaatgcgtttcagctgttaatgctgccgaagtttgcccagaggtagttatttcacttctgatgacttgacgtcagtatttgcgatcaggtcgccgacggtcacgtttttcagtcctttttgctttaaattgtgaataatggcggggagcgcttcttcagtctgtgttgctgaatcagaggcgtgcagcaggacaatgtcgccgccttttatatgactgtttacattttcaatgattttatcagggccgggatttgtccaatcctgcgagttaacgctgtaatgaaccactgaatagtggtactgctgtgcaatggtaagaacctttttattaaattgtccggtcggcgggcggagtaaatgaacattcttcactcccagctttttaaatgcagtctgggcccggaggatatctttttttatttcattgtcctctaggttggtataattcttatacgcatatcccatgctgccgatttgatgtccgtcttttaccatacgttcaactgtgtccgggtgccgttccgcccaagaagctgacagaaaaaaagtggcgtttttaataccgtttgcttttagcgcgttcagaattggaactgctttttcgtcgccccagctgatatcgaatgttaatgcgacttcgcccgctttcgtctccccttttgaaatagccttcgggccgctatcagttaaaaatacaggaagggggacggctctctgtatataaaaaaagctggctgctgcaaatgcggcaatgataataataagcagctgttttatccttctgatgtgccacacgtagaagtgattcactgatgacgcctccttatcttgtccatgcttgattacatcgtatgctgcggcggagatgaatataacgaaatacgttttaaaaaaatgaaaaaaacacttgctaaatttaaagaatgcatggtatattattaaacgt

SEQ ID NO: 59 - DNA, 3056 bp, Bacillus amyloliquefaciens
ttctctcaaaactagataacagtaagcatacattcaaattggttaagtcctcgatcgattagtatctgtcagctccatgtgtcgccacacttccacctcagacctatcaacctgatcatctttcagggatcttacttccttgcggaatgggaaatctcatcttgaggggggcttcatgcttagatgctttcagcacttatcccgtccgcacatagctacccagcgatgcccttggcagaacaactggtacaccagcggtgcgtccatcccggtcctctcgtactaaggacagctcctctcaaatttcctgcgcccgcgacggatagggaccgaactgtctcacgacgttctgaacccagctcgcgtaccgctttaatgggcgaacagcccaacccttgggaccgactacagccccaggatgcgatgagccgacatcgaggtgccaaacctccccgtcgatgtggactcttgggggagataagcctgttatccccggggtagcttttatccgttgagcgatggcccttccatgcggaaccaccggatcactaagcccgactttcgtccctgctcgacttgtaggtctcgcagtcaagctcccttgtgcctttacactctgcgaatgatttccaaccattctgagggaacctttgggcgcctccgttaccttttaggaggcgaccgccccagtcaaactgcccacctgacactgtctccccgcccgataagggcggcgggttagaaggtcaatacagccagggtagtatcccaccgatgcctccaccgaagctggcgctccggtttccaaggctcctacctatcctgtacaagctgtaccaacattcaatatcaggctgcagtaaagctccacggggtctttccgtcctgtcgcgggtaacctgcatcttcacaggtactataatttcaccgagtctctcgttgagacagtgcccagatcgttgcgcctttcgtgcgggtcggaacttacccgacaaggaatttcgctaccttaggaccgttatagttacggccgccgtttactggggcttcaattcgcaccttcgcttacgctaagcgctcctcttaaccttccagcaccgggcaggcgtcagcccctatacttcgccttacggcttcgcagagacctgtgtttttgctaaacagtcgcctgggcctattcactgcggctctctcgggcttgcaccctaacagagcaccccttctcccgaagttacggggtcattttgccgagttccttaacgagagttctctcgatcaccttaggattctctcctcgcctacctgtgtcggtttgcggtacgggcacctctcacctcgctagaggcttttcttggcagtgtggaatcaggaacttcgctactataattcgctcgccatcacagctcagccttcacgggaaacggatttgcctatttcccagcctaactgcttggacgcggatatccaataccgcgcttaccctatcctcctgcgtccccccattgctcaaatggtgaggaggtggtacaggaatatcaacctgttatccatcgcctacgcctttcggcctcggcttaggtcccgactaaccctgagcggacgagccttcctcaggaaaccttaggcattcggtggaggggattctcacccctctttcgctactcataccggcattctcacttctaagcgctccacaagtccttccggtcttgcttcacagcccttagaacgctctcctaccactgttcgaagaacagtccgcagcttcggtgatacgtttagccccggtacattttcggcgcagagtcactcgaccagtgagctattacgcactctttaaatggtggctgcttctaagccaacatcctggttgtctaagcaactccacatccttttccacttaacgtatactttgggaccttagctggcggtctgggctgtttccctttcgactacggatcttatcactcgcagtctgactcccaaggataagtcatcggcattcggagtttgactgaattcggtaacccggtaggggcccctagtccaatcagtgctctacctccgagactcttaccttgaggctagccctaaagctatttcggagagaaccagctatctccaggttcgattggcatttcacccctacccacacctcatccccgcacttttcaacgtgcgtgggttcgggcctccattcagtgttacctgaacttcaccctggacatgggtagatcacctggtttcgggtctacgaccacgtactcaattcgccctattcagactcgctttcgctgcggctccgcatcttctgcttaaccttgcacgggatcgtaactcgccggttcattctacaaaaggcacgccatcacccgttaacgggctctgactacttgtaggcacacggtttcaggatctctttcactccccttccggggtgcttttcacctttccctcacggtactggttcactatcggtcactagggagtatttagccttgggagatggtcctcccggattccgacggaatttcacgtgttccgccgtactcaggatccactcaggagagaacgaagttttgactacagggctgttaccttctatggcgggcctttccagacctcttcatctacctcgttcctttgtaactccgtacagagtgtcctacaaccccaagaggcaagcctcttggtttgggctggtcccgtttcgctcgccgctactcagggaatcgcatttgctttctcttcctccgggtacttagatgtttcagttccccgggtctgccttctcatatcctatgtattcagatatggataccactccattacgagtggtgggtttccccattcggaaatctccggatcaaagcttgcttacagctccccgaagcatatcggtgttcgtcccgtccttcatcggctcctagtgccaaggcatccaccgtgcgccctttctaacttaaccgttaaaaagaatcactacgtgatatcttgcattactaattgaatgtgaattacttctgttatctagttttcaaagaacaacgttggtg

SEQ ID NO: 60 - DNA, 38689 bp, Bacillus amyloliquefaciens
aataaaaaaagcccattccgtcctgaaaaataaggacgaaatgggctttccgtggtaccaccttgtttgaacgcgtttttcacgcgtcccgctttcctgtaacgccaggttatcgcgcctgagttttcccctcaggactccaaggcaggttcggcaggtttcatgcggcaaaatgtttcagcgggccattttgctctctgtcacagaaagttctgcgtactgatcctcttcaacgctcaatgatttttttatattatgcaaagaaaacaggttcttgtcaagacattttcatccataaaaaacagtccgcctccccggcggaccgtcattaattaaatacgatcgttttgtttccgtgaacgatgacgcggtcttccagatgccattttacggctcttgccaacacgctccgctcaatcgttctcccgatattcttcagatcctctgcgtgatctctgtgatcgacgcgttcaatatcctgttcaataatcggcccttcgtcaagatcgtccgtcacatagtgagaagtcgcgccgattaatttcactccgcgctcataagcccgtttatacggattagcgccgataaaggccggcagaaatgaatggtggatgttaataatccgattcggatgggcagatacaaaatcagacgtcaaaatctgcatgtagcgggcaagaacgatcacatcaatcttataccgctccagcagctcaagctggcgccgctccacttcggcgcggatgtctttgttagctttcatgtaatggaacggaatattcagcggttcgaccacttctttggcctcttcgtggttgctgatgacgaccgcaatttcggccatcatattgccgctttgccattcccaaatcagttcatgaaggcagtgcagctccttcgatacaaagatcgccactcgcttcagctcacttgccagagacaggctccatgtcatgccgaatgtctgggcgattgaggcgaaagcctgctgtaagtcctcttttttctcacgaatgcccttgcagtcgaattcgatcctaagaaaaaaccgtccgccttcagggtcagtcgtatattgatttgattcaataatattcgcgccgtgttcaaacaaaaacgccgacacggccgatacaattcccggctggtcagggcagctgacgagcaggcgccctttttcctcattcccgcggcggtattctttcagccgctgtgtcatatatgaattcatctgttttaatccctcgtatcttcataattcgtaacttactaatagattatactgaagatttgataaaaatcaatttacgaaagaattttcagccctacggcagcgcataaaataagcgcaatgaaaaagatgcgcttcgcatccttctgctcgccgtagaaaagaatgccggctagtgcgccgcccgctgtgccgataccggtccagatcgcataggccgtgcccatcgcaatcgtctccatcgcataagaaagcagggaaaaagaagccgcaaatccgacgattatgaagagaatccacttgaatttcttttctttttgaaattgattcattaaaatgaccccgagcatttcacaaagacccgcggctatcaggctgatccaatgcattacaccttctcctccttcgtctcaggcttatcctgtgtgaccagctttaacccgatgacaccgatcagcaaaacgccgatcagcacgattttcaccggatcggcctgttctttgaaaagcaggatttcactgagcacggtgcccgctgttccgagcccggtaaagaccgcatataccgttcctacggggaggctgtctgtcgccttgattaatagataaaaactgatgatgattcccgtaatcgtgccgctccacgccagtgccgaatcagcatgtttcaggccggtgacccataccacttcaaatacggccgctatgaccactaaaccccatttcatgttcttcaccctttctgtatccggacaatacaaaaaagcccggatagtcgtctcacatgagattgactctcccgggcttttttccctccgtgcgcatatgcgggatatgtccgcatatgtgttttctctcggaccaggccatgtatgaacatgcggaaccctagaaaacatgtctgttcgtatcatactacatttcgccgaaacgttcaacgtcagatgtgatgtcaaaaaccgtcagctgcctctcccatttggtaacggtctcaccgggcaccatgccgattttttccgcgacgcggacggaggcagcgttttccggatcaatcagcgccgctatgcgtccgtattgctgcgtgtgaaaaccgtagtccagacaggcgttcgccgcctctgtcgcatagccgcagccccagcggcggcgggcaaacatatagccgatttccatcaaagtgttcccgtttaccgtctgcggaacgattccgcattgaccgagaaatgcgcccgtctctttatcctctgcgatccaaagactgacgccgtatcctttcgccaatcgtttgttccaggcaatccattccttcgtttcccgtctgcttttaagagaaggataatatttcatgacctctctgtcggtaaacagcctgtacaaattttcttcatcgtcatcccgcatagtccgcagacggatacgcccggttgtcaggatggtgccggaagacttatgtttcatcatgcacgccacgtctcctttccctgtaatagattatggatccggcaggaaaagtcctttctcagcataaaaaaaccgctttttaaaaaagcggtttgacgattaccaaggtttatctgttccgagcgcctcggccagggccttgctgtgttttaagcggttttttcgttctccggcgcgctgaacggccgtattgtgaagcatgacttcttcctcggtttccggcacgatccgcggaacgggtaccgatttcccgtttgaatcaagcgcgacaaaggtcagaaacgacgttgccgcaagctcgcgttcgcccgtcatcagatgttctttaatgactttgacaaacacctccatagacgatgtgccgacccatgtgacgtaagattcaaggcatacggaatcctgttggccgatggggcgcaaaaaatctacagaatccattgaggccgtgactgtttcacaccggcagtggcgggccgcggaaattgaagcgatatcatcaatgtagctcatcagctttccgccaaacagcgtattgtgattattcgtatcaagcggaaaaaccctgcttgttttaacaacccttgtttctttgcaaaatcttgattctggcaacttcatattatttaaactcccctttggtgtctggtcgttttgactcattcatctgtaccctattaaacaatactttgaccgttttgtctaaaattttaaatattaagttggttagatattctctcataaatgtttcattattcatcacatccgggaataataaacgcacattgaataccgataggaggatatcacatgaacgtatccattcccaaatccacgcgaaaaccggcttgccgcagtgagtttgatgctttgcagacagtcatcttatgccggccggaacacatggccatcaaggatattattaacggaacgcagaaacatttcaaacaagaaaatattaacatacccgttgccctcaaacagcatagtgagtttattgacattttaagatctcatcagattgaagtcgtcctgctgcctgccgatcccgcattgcctgagcaggtattcacccgggatatcggatttgtcttaggcgagacggcgtttatttcaaacatggcggcttcagtccggcagggggaagaaaaagtgtttcaagacctgcttgacaataagaaaatcccctatacgcgactgaaaaaagcgaacattgaaggcggcgacatcttgatcgcagacggcaccgtttacgccgggctgagcaagcgcacggataaagcggctgtccgggagctgcgggaggcgctgccggagatgacggttgtgccgatccctctcaaggaggatttcttacatttggactgtgtatttaatatgatctcggaaacggaagcgctatactgcaaaaatggcttgcggcagaaagaaattgatcttctctccgaacgttttgagatgatagaagtgcctgaagaagagcaattcacgctcggcccgaatatcctgtcaatcggcaatcagacaattatcagcctgccgcagcaccgtcatacgaaccgcgagctcagaaaaagaggttatacggtcattgaaaccgagttttccgaaattattaaatcaggcggttccttccgctgctgcaccttgccgctggtcagaacatcttaaacatttacaaggcagtttccttcaagatacgttaatatagagaagacaagactctaaagggggaaaccgaatggctaagtacataggatacgcgggaacatatacaaaaggcggaagcgaaggcatttattgttttgaacttgatacagaagcgaaacggctcagccggccgaagctggcagcaaagctcggcaatccgacatacgtcactccgaattctgataacagcatgctgtattccattgaaaaggcagacggaaaaggcggcgtcgcagcctatcagattcatcagaacagcggggaattaacttttgtgaaccaccagctgattgaaggcccgtctccatgccacgtcagcattgatgataaacatgaatatgtgttaaccgctaattaccacagcggaaaagtgcacgcctttcccgtcaatgaggacggaagtctgcaggagccggctgccgaagccgctcatacgggaacaggtcctcatgaaagacaagagaaaccgcatacccatttcgcaggctatacacctgagcataactacattgcagccgtcgatttagggacggatacgctttatacttaccaaatgaaaaacggttcgctcacagaggtgaaaactcactctttcgcaccgggttcagggccgcgccacatcgttttccatccggcggaaaaatacgcctatgtcatgacggaaatcagtaatgaagtcatcgcgcttgaatacaacccgaccttaggtgaattcagagagcttcaggtcatttccgctttgcctgaaggctttacggacaaatcgcaaggcagcgcgatccgcatatctaaagacggcagatttctttatgccgccaaccgcggacatgacagcatcgctatctttaagatcaaccaatattccggtgaattgtctcttattgaatgggtgccgacagaaggcaactggccgcgtgatttcgcgtttgacccttccgagacattccttgtcgcgtcaaacgaagaaacgggaaatctggttttgtttgaacgtgatccggaaacgggcaaattgactcttctccaatctgacattccggttccgtatccggtctgcgtgtcatttctgcatcaggtttaatcaaaaaagaaagctgactttatattgtcagctttcttttttgtataaatggcaggcgacaaaacgccccgccttcacttcttcaagctcaggcgttatcttaccgcagagctccatcgcttcaggacaccgcgtcctgaatacacagccgctcggcgggttaagggggctcggcagctcccctttcagaataatccgttcacgcttgtcctcaagaagcggatcaggaatcgggattgaggataaaagcgccttcgtataagggtgaagcggttcccggtaaagcgcagcgctttctgtaatttccatcatgcggcccaaatacatcacgccgatccggtcgctgatatgcttgaccattgataaatcgtgggcgataaataaaaatgtcagccctttctctttctgaagcctttttaaaaggttgacgacctgagcctgtaccgacacatccagcgcggaaatcggctcatccgccacgataaattcgggatgcagagagagcgctctggcaatcccgattctctgcctctgtccgccgctgaattcgtggggataccggctgccgaaatccggatggagcccgacagcttcaagcagttcatccgccatcatcagacgggctttttttgtattgtaaagattgtgaatttccatcggctccataataatttcccttacggtcaggcgcggatttaacgaggcgtaagggtcttggaaaatcatctgcagcttgcggaagaagaccgaccgctgttctgccgcggcacggtgtatatccgtcccttcatatgataccgaaccggccgtcgggtcatacagacggagaataacccttccgagcgtcgatttaccgcatcccgattctccgacaagtccgaatgtttcccctcttttaatgtgaaagctgacaccgtcgactgcttttacggctttctttcttcctgcgtcaaaatgcattttcagcccgctgacttcaaggagcggagatgccgtcattttctattcccccttttcgcttatacagcggcgtacggtgcataattctttttcatagacggttccttccaaagacagcacttcgattgtttttcccgttttcggggagtgcagcattcggccgtctcccagcgccaaaccgacatggtggatcgcgccttttccttcttcataggcgaaaaacaaaaggtcagccggccggatatcgtttaccgccgcaccgcacccggcttttgcttggtcctttgcatcacggggaagggtatagccgtttgctttaaatatcgaatacataaacccggaacagtcaaacccgaaaccgctcagtcctccccataaatacggaagcccgagaaacatcatgcccgtttcgatgacatcggccgtccgtccttccgtatgccggcactcgtctgcgtcagcttcatttacgaaccgttccccgagcggcgtcaccacccggaaaaagcctttctcacgtcctgatgcccgaagacgcgttaagaaacttacttccaagtccggtttgccatttgtgtgatataaaatagctgtcggtttggtaatccatacggcgggggaagatgtatgaaagccgtcttttgaaagctggctttttttcatccagcccggatatccgcgcacatcctttcttgaaggctggctgggaacggcgacaaaagcccattccccttcctctttaagaatgatcacctcttccccgaaaagcgcttgcgtttggacaaggttgtctgtgcataattgcagccgctcttcatatcccatagacgctaaccattttctgatctgcggcgggttttcgagcatgggcgtatcatacgaacggggagatgacggcagcgtccatacattggctgccgccgctgtaacggctgctctcatcttttcgccccctcttgtatcgacacaccggtaatgccgagacccggttcgtcgggaatcgtaatctgactgccgctgtatgtaatgccgccttgaatcaaatcatctttcagcataagcggcgcatcaaaatcaaacctcgtcacattccgtttggccgcggcaaaatgggccgcggcggtgatgccgagcttggtctcaatcatgctgccgaccatgcattccacgccgcacgtttccgccatcgcattgattgtttccgcctgctttatgccgcccgctttcatcagcttaatattaattaaatcggcgcttctcgtctgcagcacgtgaaaggcctgacggggggtaaagacgctctcatccgccataatcggcgtgtctacggcatctgtgacctgcttcagcccggcgatatcgtctttatgaacaggctgctcgaccagctcaatgccgagaccggcgtcttccatctttcggatcgcaatcacggcttctttcggcgtccagccttggttggcgtccaatctcagtttgacgtttccgccgacacgtgatctgatcgcctgaatccggccaatatcgtccgatatgtcacctatgccgacttttacctttaaaatatgaaatcctttgttcacataacggtctgcatcccccgccatctcctcaggagaattaacgctgacggtaaaatctgtttccagtgtattccgatagccgccgagaagccggtaaagcggctgtccgtgcatttgcgcccatccgtcatatacagccatatccaccgcggcttttgcgctttgatttctttccaacagccggctgatatcatacagaacagcttccgtgccggaaaggctccgtcccaagagagcaggcttcagcacatcgtggacggcgctttcaataccggccgcgctgtcgcctgtaatgacaaccgtcggcggcgcctccccccagccggtcagaccgttgtcaaaagtgagcttcacaatgaccgattcagcattgtaaactgtgcgtaaagcggtcttaaacggctttttcagcggcacggacatccgtcccgtttgaatatctgtaatcctcacgcctgatcactcccttccggaaacccccgattcaatcgttaccgctttggccgccgtatccataaccgcgcgaactccgatcggaacggcgaagctcggtgaacaatggccgattttaaagcctttaagcgcgggcttccctgatttgacaatgtaatcgttcagcacttgctctaaggtaagggacttttctttgtttttcggttcgcattggtgaaaatcacagaccaggattccggctgcgtctgacagttttccggccatctttaattgattcagcattctgtcgatttgatacggctcctcttcaatatcctcgataaacagcaatttgtctttcgtatcaatttcaaacggcgtgccgagcgtggaggtaatgagcgacaggttgccgcctgcaagctctccctcagcccttccgcctgtcagcacctccagcggagaaatgtcctccgtataggtgaattccgtttctgtaaaaagctgatgatacgacgctttcgtcaggggatcagcattttcaagcccgacatccgtgctcagcatcgggccgtgaaatgtaacgagccccgtattttgatgaatggcggtatgtaaaaacgtaatatcactgtatccccagaaaattttcggattgcggcggattaagccaaaatcgatgtcggcggcaatgcggcccgtgccgaatcctccgcacgcgcatatcaccgctttgacattctgatcactaaacatgtcatggagatcatcgaggcgcgcccggtcttctcccgccaaatagccgtgacgggtcttcagcgcccggccgagtttcacatgaaggccaagctcattctctaaaaacagcagcgcggtttgcagcgtcccgctctcaggcgggcttgcgggcgcaatcacaccgaccgtgtcgcctttttgcagtgctttcggtttatggttcatgactttttcaatctcctttccggattgaaaagtgaaacacgccgctcctttaacggcaaaagagcggcatatgtttccgctgtaagatcaggacttttccgcccatttcagatcaatgtaaccgacggggtgccggacaatgcccttcacgccgctgttctgcagatgcacctgattataaaagtaaatcggaatgatcggagcctcgttcatgagcagtttttccgctttatgcatgagcgcaaaacgttttttggcatcggcttcctgttttgcctgcttgatgtagccgtcgtataccgcgctgccccagccggtgcggttcatggaattatccgtttggaaagcctcaagaaaactgatcggatctgcgtaatccggtaaaaatgagctttgagagaactggaacttcagtcctttctgctcttctaaaaagacgttccattccatattggcgagcttaacgtctataccgagcacacttttgagcttctgctgaaccgcttccgctattttcttatgctccggttttgtgctgtatgtcaaggtaacggcgggcagcttgtcataatgctcttccgccatgcctttttccagcagttttttggcttctgattcatccggatttaataaactgccgcccgcttcgcggaaatctttcccgtcaggctgagtaaatccaggggatacaaaggcatgtgccggcttttcactgtttttggtcacataatccgtgatttctttctgatcaatcgctgccgcgaacgcttttctgatcttttcattttgaaacggctccattttcacgttaaaacgatagaaatagagtccggcctgatcccacgtgcggacattttttcctcccatcagctgctcgctcagctctgccggcacaaaggcggtatccaaatcccccgactggaacatctgataatcggtattccggtcactgaccatcgcccatgtgactttatccagtttcaccgtctttttatcccaatacgtctcgtttttgtccatcgtcatgctgtcgtcatgcttccattccgtcagtttaaacggcccgttgccgacaaatgtttttgcttcagtgaaccatttcggatcagccttggcgaccttttcattaatcgggaaatacgccggattggacacgacgctcagaaaataatcctgcggcgccgccaatgtgacgacaagcgtttttttatcctttgccgtgactttcacgtcttcttgtttgccttttccgctgttaaattcttctccgcctttgatcatgtagccgagaaatgcggaagatgcgcccgttttcggatcgagcatccgtttccaggcgtacacgaagtcttccgccgtaacgggatcgccatttgtccattcggcgttatcacggatattgaaggtatatgtcagcttatcagcggacaccttccagctttccgccatggccggttctggcttattatcttttccgagcctcgtcaatccttccatgatgttattcagcggctgccaggaaacattattaaatccgatcggcggatcaagtgaggtcggctcattttcgttattgagccgcagcaccgtttcacccccctgttcttttgctttgccgggttctgtccccgcctgttcattggctgtacagcccatcagagcaaacgaaacaacagcaatcacaccgaacgcccatctctttttcatttcaatccccctttttcctctgttgccgtcagctgctgcttcagccgctctgcacggtgatcctgaagccagcagttgacgatatggcttttggatttcacggttgttgccgggtataccttttcacagacgatcatcctgtccgggcagcgggcggcaaacgggcagcccggcggcggatcgaataaatcaggcggcgtcccgtcaatcggcgaaagctcactatcctccatatccagccgcggcactgaatgaagcagcccctttgtgtatggatgagccggacggtaaaaaatatcatgcctcgtgccgatttcggcgattttccccgcatacatgacggcgactctgtcagcagtctgagcgacgacgccgagatcgtgtgtgatcagaataattgacacgcctgtttttctttgaatcttcttaaataattcaaggatttgtgcttgaatcgtcacatcaagggccgttgtcggttcatcggcgatcataatttccggctcgcagatcagagccattgcgatcacgatccgctgccgcatgcccccgcttaattggtgagggtactgcttcaggcgggatttcgagtccgggataccgaccagatccagcatggcgagaacttcggattcagcttgttttcttgtcatggcgcggtgttccaacagcgcttctgagagctgatcccctatggtcaacgtcggattgagcgccgtcatcgggtcctgaaagatcatagaaatattgcgcccccggattgcccgcatttcccgatccgacatttggcaaaggtctttctgtttaaattgtatgcttccggattcaatctttgccgaatgtttcggaagaaggcccatcacggcttgtgacgtcacgctttttccgcatcccgattcaccgacgatcgcaaacgtttcacctttatataaatcgaagctgacgcctctgacggcttttacagtgcctccgtatgttgaaaaagtaacatgcagattttgaacggaaagaacttgctgcgccatttttcctacctcctcagtttcgggtctaacgcgtcctgcaagccgtctccaagtacgttaaacgcgtacatcgtcaaggaaatgaaaaaagcggggaaaaacagccgccaccaatggcctgataaaatcgccggcagcccgtcgtttgccatgactccccagcttgcaaacggcgcctgaatgccgagtccgagaaaacttaaaaatgattccgcaaaaatcgccgccggcaccgtaagcgtcatttggacgataatggctcccatcgtattcggcagcagatttttcttaataatccgaaatgttttcgctccaaacgttttcgaagccaatacgtgttcatcatgcttcatcctcagcacctgccctctgacaatccgcgccatgccgacccatcccgtcacggtcagagctacgataatggaactgaaccccggccccatcagcaccattaacaaaatgacaacgagcagatacggcaatccgtagagaacctcgatgattctcatcatggcgctgtctgtccggccccctttgtagccggcgacgcctccgtagataacgccgatcaaaaagtcgatcagcgccgccatcacaccgacaaataaagagatcctcgctccgtaccatgttcttgtaaacacgtcccggccaagttcatcggttccgaaccagtgtgaaaaagacggcggaagattctgctcggcgagcgtctgccttgtcacgctgtgcggtgatatcagcggaccgaacacagccgatagaaacaggcagcataatatcacaagcccggccatcgccaatttgttctttttaagccgccgccacgcatcctgactgtaagacaggctcggacgcttgaccgactcggtttcaccctttctttccgcgcccggctgaaaccagtcatcaggcacttctgtgtgttttaccgtttcttgcgggagattcatcaggatcaccctttcttatgaagttttatgcgcgggtctaacaggccgtatgccaaatcaaccagaaacagcaggacgatcagaatcacactgtaaaatacggtcgttcccatgatgaccgggtaatcacgctgattgatgctttctacgaaatatttgcccattcccggtatggcaaaaattttctcgatgacgaaactgcccgttaaaatacttgcggcaagcgtcccgagtactgtcacaacaggcataagagcatttttcaatgcgtgtttgatcacaattttgacgggagaaagcccctttgcttttgccgtgcggatgtaatcctgagtcagcacttcggccatgcttgatcttgtcagcctcgcgataatggccatgggaccgacggcaagcgcaacagtcggcaggaccatgtgaacgggactcgtccaggtagctgccggaaaccatttcagatgaaccgcaaattgctgaatcagcagcgtagccataataaaattcggaatggaaatcccgagcaccgcaaggctcatagccgcgtaatcgagaaatccgccgcgcctgagagcggccattatgccgagcgcgagcccggaaataacagcgatgatgatcgccgttatcccaagctcaaatgagaccggaaaccctcgttcaagcatagcgtttacactgtctgacggttttttaattgaaggaccgaaatcaaaggtaagaatggattttagatagatggcgtattgagtgataagaggttcgttcagatggtagtaggattcgagatttcgctgaaccgcttcgtttgtgccccgatcttcgttaaaaggcgagccgggtatcactttcatcatgacaaatgtcagagtggtgatgacgaggacggtcataatcatggcgataaaacgtttgataaaataccgcagcaatgccgttcacccctttaacagaatgttgttctcatggcgagttctgtcatgacgagcatggcctgataggcttccggcatgtcttttgcctgaaattgaacgattgttgttcccgggatgatttctgtgcccggcattaaatgggcccattcagcctgtccgtagttggcaaattcaatgcctaatacaggtctttcaggcggagtcagcggtttgaccttatctttatttttgagcgcataggctgttttttccgtcaggagccgtccggctttttgaggggacaggcatttgaccgcggttcttgaaatggtttgtttgacggcggcagtcgtcacattcgggatcagctcctccgcctcttttgcggcgcaatcatctccggcagccatgatgaccgggacatcgtaaaatccggcgagataggcatttaaccccagttcaccgaccggcttatcatttatgtaaaagtggcggacgccgaatatcatgctgtgcgacataacgcccggcatcgacgctctcgcatgatagccgataaacatcacacccgaatacgattcatcaagcccctgcatcatggaaaacggcttgacatcccccgtaatcagctctgcctcagggtgaagtttttccgcgagcagattattcatctttgagtggctgtcattcacggtcacttccgtgcatccgttattaaacgcttctgcgatgcaccagttcgcttcttcggtcatcagaaccctgccgcgctcataattgtgcatgcgggaattgacaaatgtttcatcaggcagtccggaaatcccttccatatccacagatagatacagtttcatgtaatgcctccttttttacttaaaatttcgatattaaattatgaatattctaacaaattatattaaaaaaggatgaaacatgcaatataccattctgccattataggaaaaaacaaacccttttcaccgggaaaagggtttgctgatagaaaaagttacatactgtttttgcttatgtgatgacgctgaaactgtctgaccgcacttctgtattcatgatcgggaatgacctgatgcctgatcggttcaggagcctgcggcgaaggctcttcagccgcctgcttacggacggcatgcggtttatgcgccagcttatgccccatgccggtcgcattcatgacaaatgataaacacactaaaagcaaacttaagatgaaagcaataagaaacaaatcgctgtatgtccccatcagcaggtcatgcggcgattgtgtgccgcgcgcgccccgaagcgtgccggaagcatctcttttcgtaaaataccctattaaaacaggagcgcccatataaatgaacagccttaaaaactgaactgccgtcatgcgtttcaccagttccggaagcggtccgcccaacgcggctcccatcagtccggctgccacaataagccctgtcccggccgccagcatcacgaaaagccccgcaaatagaataagcggtatatgatgatctgccgtcatccattggaaattcacgaacaccagtataacagagcctgttatgccgagcatgcccggaccgactttatcatatgctaatgcactgatgacagcggcgatggccacgcctcccaaaaggctcgcatataggaatatcagttgagtttgtgacatatgatatgcggtctgaagctccccgtgaaatgccgaaagactgaccgctatggaaatactgcccgcagcgatcatgaaaacacccagaatcggctttggaatcagcataagtttaatcgaaatcagcgcatgttcgtttctgtactgcatgatcagcaagatgagaagaatggcgatgcttcctccaaatcccgccaatgtctgccatgatgaaaagccccatttcggcagatgaataaatgtataggcggtcagcacggctgatacacccgctaacagaaaaccgatgccgtcaaatggagatttttcagcatttttatgagcgtcatcccgcagccacatataactgaaaatgaggccgaaaaaagacagcaggctaaaaatgccgaacagccaatgccaatggccggcgcttgccgccgccgtgcctaaaacggtccccataatgacggacccgtaaaatccgccgattaacacaaataatgcgtaattccggcgctcaatcggaaacgaaagcaccagcatcggaatcataatcatcagcatagtacccgccgcagctccctgtaaaaaacggcccgcggcgagcggataaatatcatttgtcacagcagcaaggagcgctccgatgacacccgcggccatcgaaatcatatagacaggccgggagccgaatctttttcttaaatacggccccgccggcacgaataaggcaaatgccatattaccgataataatcggatgaaaagagtcaaagttttccccgccgaccgtctgccggacaaggctttggacagccgaaagagcggtattcgacatcagccccggcccgaccgccaatacagcaagcagagaaatgatccagtgatgtttttctttcatgtgacagctcctttctgactatttgacaaagtgaaaaagctaacagatttcccccattagcttgacagaatttttcatatcttttcatgtgaaggattgaacataatatctcatttattatttcaaatccgatggaaattgtcaatatacagcgcctccgtccgatttcatctttttcacaatttcccacaatcttttcattattatcccacactttttgtttaagatggagtcagtaataataggcaaatcatgctatgatgaaatagagaaacggagtgaacatgatggataactatcgtgatgaaaatcggacagaccaaaaagaacaggaagtccttttagtaaaagaaaacccgcagccggccggatattccgcgccggacgaggacaagaaaaaacgaagcttcggctggttcagaccgcttctcggcggagtgatcggcggagggctcgccctcggcatctatacatttacgccgcttggagaccatcagactcaagatacttccaatccggctcccgctcaggaaacgtcatcggtaaccgccaagcagacatcttctgattccggcagcggcaaatcggcaaacagctcatcggcaaattcaagcagcatttcgaatatggtggaagacatttcaccggcgatcgtcgggatcaccaatctgcagaagcagcaaagcagttccgatttattcggattcggatcaagctcagattcaaactcaaattcatcgggtgatgatgcggaaacgggatcgggttcaggcgttatttttaagaaagcaaacggccaagcgtatatcattacgaataaccacgtggtcgaaggcgcctcttcccttaaagtgtcattatatgacggcaccgatgtaacagctaaactcgtcggcagcgactctctgacagacttggccgttttagaaatcagtgataaacatgtaacaaaaacggcaagcttcggcagttcatccgctctcagaacgggcgaatccgtgatcgccatcggtgatccgctcggcaaagacctttcccgcaccgtcacacaaggcatcgtgagcggtttaaacagaacggtctcgatttccacgtcagctggtgagtcaagtatcaacgtcatccaaaccgatgccgcgatcaatcccggaaacagcggcggaccgctcttgaatacagacggcaaaatcatcggcatcaacagcatgaaaatcagcgaaagtgatgtagaaggcatcggctttgccatcccgagcaacgatgtaaaaccgatcgccgaagagcttctcacgaaaggacaggtggagcgcccttatatcggcgtgagcatgatcgacttggaacaagtgccgcaaaactatcaggaaggcacactcgggcttttcggcaaacagctgaataaaggcgtttatattcgcgaagtggcgcagggctcacctgcagccaaagccggattaaaagcagaagacatcattatcagcttaaaagggaaagagaccgacacgggcagcgaacttcgcaatattctctacaagaatacgaaagtcggcagcaccgttgacgtgaagattatcagaaacggcaaggaaatgacgaaaaaaatgaaactgactcaaaaagaagaaacatcttcttaacaaaaatccaaggcagccgccttggattttttatatacagatgaaactttaggcctggatcagccgtatgacctagtgtacaaaggaggatacatacacatgaaacaaaccggacttttgctggtcgttaccggcctgatcttgctgcagctgagcattcagcttcctcagcaaaacgctgcttggggaatgacgcttggcgcaagcattttactgaacctttcgggaaccggactgatcatgcgctctctgcacacgcagaccggccgcagatgaataaaaaagccgcgggacattctgtcatcccgcggcttttatttcacataaaagcaccctgtccgccggccggacagggtgtttcggttaagacatatgctggtcccgataaatcttttcgtttttcatgccgtacgctttttgcacgatatagagcggacggtcttttgcttcgtcataaatccttccgatatattcgccgatcattccgagcattaatagaacgatgccgctgaataacagctgtatcacaatcagagaggaccagcccgtaatggtgctgttcgtaaacagcttcatgtataaaacgataaacatatagagaaaacccgctccggacatgatcattcccgcatagcttgccgccttgagcggtttatgagagaacgttgtgattccgtccatggaaagcttcagcatttttttaagcgggtatttcgtttcccccgcaagccgctcatcacgttcatattctacagcagtctgcttaaagccgacccagctgacgagtcctctgacaaaaggatttttttcttttaatcttttcatctcatcacagacttttctgtccagcaggcggaaatctccggtgtcgagcggaatatcaatatcagtcacgctccgcagcagccggtaaaacatagaggccgtctgtttcttgaaaaaggtttctccctttcgtttcgttctgacggcgtacaccacatcgtagccttctttccactgctcaatcatatcaaggattaattcaggagggtcctgcaaatcggcgtcaatgacggcgattgcattcccctctgcataatccatacccgctgtgatcgcgatctgatgtccgaagtttctggaaaaatcgataattttcactctcggatcaatcagactttgctctcttaaaatctcaatactgcggtctttgcttccatcattgacaaagatcaattcataatgctcttttgtttgatccatgacttctttcaggcgctgataggttgtctgaatgacgagttcctcgttataaaccgggacgactattgaatattgaatatgtctgctcatgttttttcctcctattcatcagattgaagttcgtatagtgaagctgactgattcattccgcccggcccgccgctcattcggctgtttttacccgcggccttgctgctttttgtatcagctgcatcatgatttttcgttttctgatctgtgcttgattgccatttatctgaagatactttctttccgtttttctcaacccactgcacaatatcgttatttccgcctttgcccattccggatgttaagaagtattttacttttccttcttttacgagctttttaaattgagtcagcgtaatggccgggtcagacccgctgaatccgccgatcgccatgaccgcttttttcgttttaataatgtaaggcgccgccgtgttggaatcggttgtagcaaatagatagtccgctccggcgttgtgtttctctaaatagttgatcagttttgtattgacagatgcgttatccattcccatgccttttccgcttgttgaagcgagctgagggcctgtttcaggcaatgagctgttgcctccgtacagaagcggtgtgctcgcccaataaatcggcatgaccatcaagacgagaagggctgcaagtgaaacataataactgagcggtttttggcgctgtttgaatacgaacagggcgattgctgccactgcgccgagaacgcctgctccgatgctccagcctgcgccgatttgatcattgtagtttctgaggataaacagctcaaatccggttgtcacaagaatagcggccggcaatagccaagttttccatcccgcctgcttgcggtacagatgaacgagggcgacccatcccgcaccgacaagtgccgcgatcggaggcgccagcataatgagataataatggtggaaaaattctgcgacactgaagaatccggcaatcggcacaagccacgctgcccaaaagatcgtttccttctgttctgctgataatcttcttctttctctcgccccggcgatcaataaaccggccattccaaaaatcgcaaacggcaggagccagctgatctgatcagataattccgtttggaaaaggcgcagcggaccaggggttcccgtaccgaacattcctgaacctgattgcattttcgagccggtgcctgcaccgctttttcctccgccgccgggaccgcctccgccgccatctccgccgcttggagggcctccttgaccgccgcttggcattttcccgttagatggaggtgccgtcatactgccgttttgtgatttgtctccgcttgctgaactgctgcttgaagactggccaggcggtttttgcatttgtgaagaaccgccggaagaagacatctctttcgatgcgtttccgtccggcccgccctggccgccgccggaactttgccctgtcagccgctgaatcccgttatatccgaaagccaattccaatacggagtttgtctggctgcttccgacatatggccttttgctggcaggaatattgtcaacaatgagcggccatgacaatgaaacggctgctaaaacggctaacgcgcttaccaatgaaatgatttttttcttaatcgtggtgtttgccgcaatcatatagaacagcaagaaggccggcaaaatcatataagcctgaagcatttttgtgttaaagcctgctccgacgacaaaaaatgccgccaaaagccagatcagtctgccttttctgatcgctttaaagagaagccatgtggcgaacaagaggaaaaagaccagtaaagcatcgacattgttcgtccgcgcgaccgctactgcgatcggtgtacacgccatgacaaatgaggcgatgcgcgccgccgtttttccgaacgtcggctttattaataagtacatgaatagaactgaacctacacccgccaatgcctgaggcaggatgacgctccacccgtgcataccgaatatcagcgcgctgatcgtttgtatctggtatgtaacaggcggtttatctaccgtgataaacccggctgcgtcaaatgaagcgtaaaagaaattatgaaagctttgaagcatactcgttaccgctgcggtgtaataaggattcaccgtatcgtcattccagatgttgtacatattcaagaatgcggaagcgagtaaaatgagaattaagactgcgtctatctcgcgttttttcattttcacctgtgttttcactccttttgtttaactttgaacaagtgtaacaaccaaatgtgaaaaatttattaataaacaaagacaattattttgccgtttacaaataggtaaaaagaatgacaaaacgggtaaaaaagcaaaaaaatgatgcccccgtcaagccgggaggcatctgtcatgatttccgatttactgaatcggtttcagccgcgcttctatttcagaacggcggtgttcgagataaggcgggagcgcaaccgttttgcctagctcttcaggtttttcatcaaccataaatcccggaccgtccgttgacaattcaaacagaattccgttcggttcccggaagtacagcgctttgaaataataacgctctacaatgcctgagttgctgaaaccttctttcgtaatgatgcggtgccataaagcaagctcctcttcattctgaacgcggaaggccacatggtgcacgctgccttttccaggacgctcgcgcggaagatcgtttctttcaatgagatggacttctgtacgcgcgcctccgtttcctgattcgagtaccgtaaccgtgccccggtcttcatgcgtttctttcccgatttcagtgaagcccagcacatcagttaacacacgcagcgtcggttctgcatacgggacggtcaattcaataggaccaagaccgcggaaagaatattcttccggtatgccgctttgcttcaccgcttcaccgatgtcttttcctttttcgtcagctgtcagcacaagccgctgtccttcatgatcctgaaaagcgagtgtgtccctgcccgctattttcacgatctcactgtgagagacctgatgctcttcaaatcgttttttccaatattgcagcgcttgtgcatccgggacacgcaggccgattgaagaaatactgtttgtccccgcatgaaacggcgcaatccgcggaatctcgaaaaacgtcaattcagatcccggattggctgtttcatcaccgtaaaacaaatgatacatcgtaggttcatcttggtttacggactttttcacaagcttcagtcccaggatgttccgatagaaatctaaatttttctgcgcatcagccgtcaatgctgatacatggtgtattccattaactttcattatgttatcctccagtcaattatctcgatttcgagatatttatatatacaatttatgttatccggatcgtaaagtcaacccatctgcttcacagacggtctgcagactgccgctccctaaataacgaacctttgatataaaaaaaccattaatgttcgcttttaaaacggtattttttccttctcaaaagcagaaacctttatcttttagggaaaacaacaaaatcagaaaatttattttattcgtgtttcagcaattagggtttacaatatggaaaatagttttttcatcatgacgattttacatctggagggaaaggatatgcagattgaagagaacggacttaaaaaagagatcggccttaccatcgccctctcacttgttatcggcaccatcatcggttccggcgtatttatgaaaccaggcgccgtgcttgcctactccggtgatgcgaaaaccgcgcttatcgcgtggctgttaggaggcattttgacgcttgccggcggcttgaccgttgcggaaatcggcactcagattccgaaaacgggcggactttatacatatctcgaagaagtgtacggcgaattttggggctttttgtgcggatgggttcaaattatcatttacggccccgccattatcggagcaatcggcttgtatttcggctctttgatggcgcacttgttcaattgggattccggctggtctaaattgatcgggatttcagccgttttgtttttaagcatcattaacattatcggaacgaaatatggcggcatcgtacagggaattacgactgtcggcaaattgattccgattatctgcatgatcgtgttcggcctttggaaaggcgatcagcatatttttacagccgttacaagcagcatgtcggacatgaatttcggcgctgccatactggccaccttgtttgcttatgacggatggattctgcttgcggcactcggcggcgaaatgaaaaatccggaaaagctgctcccgagagcgatgacgggcggactcttggtcgtcaccgccatttatcttttcattaactttgcgctgctgcacattcttcctgcgaccgatatcgtcaaactcggtgaaaatgcgaccggcaccgctgccggaatgctgtttggcgacattggtggaaaattgatcagcgtcggaatcatcgtcagcatcttcggctgtttaaacggaaagattctcgcttttccgcgtgtctcgtttgcgatggcggaacggaaacagctgccgtttgccggacagatctcgcgggtgcatccgacgttccgcaccccttggattgccgtgtcatttcagatcgcgctggccattatttttatgatcgccagcaatcccgataagctgtctgaaatctctattttcatgatttatattttttacgtcatggcctttttcgccgtgtttatcctcagaaaaaaaagcggcggaaaaccgcgcgcctacagcgtgcctttgtatccgatcattcctgttttggccatcgcgggttcactgtttgtgctgatcagcacgatcattacagatacactgagctgcgcgctgtccctcttgatcggccttgccgggctgccgctttatttttggctgaaaaacggcaaaaaaaactgataaaaacggttccttttacgggagccgttttttttctgacaaaatcacgtgcaaaagttgacagcaaattcacatcttttgttatactttttaagcaagatgtctgaattcgaagtatgttacgtttttttggcaaagtgggtaacataagaaaaacaggatgagacacgtttttacgaaaaaatcaagaggcgtttttttcgactttatctattttttttcgacaaaaggctatataataatttgatgtgtgcattgtctcattcaaacaatggagggtttttaatgataaaaagaaaaaaagataagttctcactccttttaacagaaatcgcaaaaaatatagatgaaactgcagagtattttgtgaacttcaaagtcacaaaccaaacaacacttaaagaatttgcagatacgttaaaagaatacgaaacaaaaggtgacaatcatgttcatgtcatgattaaagagcttaacaaagcattcatcactcctattgaacgcgaagatatccttcagctgacaaacagcctggatgatgtgcttgacggaattgaacatttctctgccatgatggagattttctcaattacttcatcagacgagcatatcgacaaattcagcggctacattagagaatgtgcgaaagaaattttaattgcaactgagctgttggcagaaaaccgcttaaaggacattcagcctcacgccatcaaaattaaagagtatgagcacaactgtgacaacctgcacagaaaatcattaaaaaatcttttcggccatgaaacagatccgatcaaagtgatccaatatcgtgaaatttacgaaacgcttgaagaaattgctgactcttgccaaagcgttgccaataatcttgaaaccatcattatgaaaaacgcgtaacgaggggttaaaatggatactctattacttttaacgatattaattgtcatttgcgctttggtatttgacttcattaacggatttcacgataccgccaacgcaatcgccacctcagtttcgacaaaagcgctgaagccgcggcacgcgattatcatggccgccatcatgaactttctcggagcgatgacgtttaccggtgtggcgaaaaccattacgaaagatattgtgaatccttatacattagacaacggatcggttgtcattcttgctgctttactcgccgcaatcgtctggaacttgatcacatggtatttcggcattccgagcagctcttcacatgcgattatcggagcgatcgccggtgcggccattgcagcatcaggttttgcgacgcttaattataaagggttcattaaaattatcgaagcacttattttatcaccgatcatcgcctttgttctcggctttatcgtatattcgatcgtgaagctgatttttaaagacagcaacctggcgaaaacaaataaacgcttccgcagagtgcagattttgacggctgccattcagtcctatacacacggaacaaacgacgcgcaaaaagcgatgggtatcattacgatggcgcttatgacggccaatttacataaaagtgatgccattcctttttgggtgcagctctcctgtgccctggcaatgggtctcggcacatccatcggcggctggaaaatcattaaaaccgtcggcggtaaaattatgaaaatccgtccggtaaacggcgtatctgccgacttaaccggcgcagccattattttcggggccacgtttattcatctccctgtcagcacgacgcacgtcatttcgtcttccattctcggtgtgggcgcttcccaccgcgtaaaaggcgtaaactggggaacggctaaacggatgctcattacatgggtcatcaccctgccgattgcaggtacactcggcgccatcgcctttttcatcctagatctctttttctgatgacatccgcttctttacagaagcggttttttttgtgacaggaaaatgatgtcatgacatagaatgaacatagcagaccatttttcaaattgtgagggatgctcatgcttttgttttttcagatcatggtgtggacgatggcggccgcactcattttatatgtgtacgcatcctggcggtatgaggcaaaggtgaaagaaaaaatgtttgccatccgtaaaacgtggtatttactatttgtactgggctccatggtctattggacatatgatcctgaatcgctctttgccgcatggagacaatatttgattgttgccgtctgctttgcccttattgatgcgtttatctttttgagcgcgtatatcaaaaagctcgccggcaatgaattagagacggatacgcgggaaattttagaagaaaataacgaaatgcttcactcctatcttgaaaaactgaaaacctatcaatatctgttgaaaaatgaaccgatccatgtatattatggaagtacagaagcttatgcggaaggcatcagcagactgctggccgcttatgccgaaaaaatgaatgtcacggcttccttgtgcgactattccgcacaatcggataaggaccgcttgacggagcatatgcctgatgcggcagacgttcagtcccgtcttaaccgtaaagacgtctactatgatcaaaaaggcaggcttgtgcttattccgtttacagtccagaaccgccattacgtgatcaaactcacgtcggaaaacctgttgacggaattcgattatttgcttttcacatcgctaacgagcatttatgatttaatgctgccaatagaagaggaaggtgacggttaaatggagcaggcatttcaaaacgggcagccggaacaaagagcgaaaccgttcaaaatgtttaaaaaacgttcaatgacaagtatcgcaagttaccaggtcagccctcataccgccagaattttcaaagaaaacgagcggctgattgacaagtataaacaaaaaaaagcttgattacactaaggacaggagacacggctcttgtccttattccttttttccttatctttcatataataaaaccaacaaagagatgcgacaggtgatgatgtgaagaaaattgtcagacgcgtaaagtttgtggattacggacgcttcgggctttccgcttattcgctgaggatgcgggcgaggaatctcgggctattgaaccggttaaaaaagaaaaaaggctgaatcccgcaatgtgaacgggactcagccttttttgttaaagctgcatcagaattttcgcttttacagcggggccgtagacgccgtcagacgtcagcccgtttacagattggaagcgggccacggcatctgcggttttcggaccgtagataccgtcaattccgttattgacagctcctttttcaggatagaaataaagcgcggcgagcgcgttttgcacctggtataccttttcgccggacgtgtacggatctgtcagctgaatcacctcgtccgggagagaatacagtgcttcaaccggcgggctgacgatcagtacttgtccgactttaatcaggttcgggtcagcgatgttattccatttctgcagatcggccacgctgacgccgaatttccgcgcgatcgccgacagcgtatctcctttttggacggtatacgtctgtctttcctcagaaccgattcccgctttaaactcatcccatgtatccaacagtcttctcggacaaagctttcctgaccaatgcttgtgcgcaacgacacttgcaagcgggatgccgtgcgacgtcattaatgtgcggatgagccattgggcgtttgccacggcctgtgaaaagttgccgtctgcgttttcacaaatttcaataccgatggatttacggttgccgtctccgtttccgtcaccggcatgccagccgttttcattcagcggaagatgctgataaatttccgtatcatcgactgtgaaatgccagcttgtcggtgtatcgggatttttcacatagcttgcgtgacttttggcgttagctccgactgcagtattggctgtattgtgcaccgtaatgtaaatcggtgtcattgcatagcctgggcggttattgtttcctgccgggataaaatcctgtgtgatttttaccatattctcatctctcctatttcgataaattgtttatttttaataaagcctgctgttttttcccttttgctgtaacgtaattgtttttaaaccaggcggcggcagtcgttatgattgtaaaaacggccgacccggcggcatacagcgtatctgcaagctggctgacctggtcctcctgaatattcagcggcgatttgccgaacatcagcaaagtttgattcaataaagcaagcaaaagaagcaccgtcctgacgaccgtgcctttgtccgcgaatttcatatcggtttcccccttacttttgcagcagattgtacatgatggcgatggctccgccaatgacgcccgtgcagattgctgtcacgatcgctcctgtaatggtccgcttaatccatgttgtgttttcgtcaattttgttcagtttttcattcagcgtcatgatttgctgatcctgccggtcggatacccgctctaatgcggccacccgctgttcaagcaccttttgttcacctttgatgcctgcgaattctttttgcaccgcttgttcatccagaagcacttccgctcccccctcttacattgttctcacctcccttcggaagtttcattcttaagaaaatgccgtgcctttgacagaaaggctcccgccggaaatgcttttgatttccatgatgatttccttaaaaccggcaatatcaaatgaccacacttcgtctgtgcctgatgtaccggcggctgatgttccgtcttcagacctgattcctctgatcggcacgttttttcccgagatggatctcccccaaaacgcgacatggcccgactcagccgtgccggtgatttcgacgagaagttttttccaagcgcccgccgagaagatgcttccctcgcccgcctctgctgcattttcatgaaaaatcacgtctgtatatgaaaacgccatatcaccgcccgtaccgacagattggtataaaacaaattcggactgcttttgatttccattttcaaaacggaaccggtaatatcgttttgtcaggcagacccaccccgaagcggtcagcactccgccttttactgcgaaagaatgtgaagctgtccacgaaatgttatcctcgctctcttcgataaaaagagttccgctgcggtccgaataagcccacccctgtgctctgtctattaagacggctcctaaacggtcttgtccgaattggctgtaaacttcaatcgcttctagcggtgtattggtaagaagctctgccattccggacagatcagcaaccggtgtgacataatcgtttttgttaccgcgataagcttttactgcgccgggtctgccaagttgatcggcgggaaattcaaatgaatgctttttcatcggccgtcctccttttctcatttattaaaaatgacaaataaaaaaagccgttcggcttatgacacagcatttttatagttttcgtatgtttcacccgttatttcttgaaattcctcaggcatgatatacttcgcggccacaccttcagccagatcttcggcagagcagtcatcatagcccatagcttgttttaccatttctattgaggcccacttataaaacaaagcgtaaacccaaaagttaagtctcttcattttttcattctccttttacgtttaataattctaattttaaagacgctaattgcctgccgagtgactgctgcgcctgttcggctgcttttctggccaatttctcattcgccagctgtcccccgaggcctgcaagctggtttgaatcgggcgccgtatctttttttaagctgtctttatatgctttgtcagccgtttccacccattcttgtttctcttcatcaaaaaatgggcgccacatgccttcgccgtttatttccggcggaacgtccgcagcgttagccggcatcaaataatctcctgtctcagaatccggataaagctcaatcggagtgcctgtataaatgttgtcattgtcatacggaaatattaatttcatattctcgctcctttacgtgagtgccaaaacaaggtcaatataatagccgttcacattattttctatattggccataattcccgtcagcttcatatctccattagaataaataataaatttgctgtaaccggtggtgccgctggctgcaaccatcgttacaacgcctttggccggcgcacaagaggatggcacactcccgaataccacttctctgtccgtaagaacgtgtccgttcaggtgaagggtgtttcccactttgcggtattgaagcggcctgtctcctgatttagcgccatttttataaggaacatttatccaaggtacattctcaatatcaagttcagtaacgaggcgccgccagccctgccagcccaagttcaaatccaaatagttcgtgaacatattatttttataatcgacggcaatgacatacccaaacgttccctttccctcactgtcaagagaggtaaaatgaaacatgccgcgggtcgaagcgttgctcggactgtttgccgctttgccggttgaataaaaggtgccgaacgccctgccgtttttaacgattttttcaagaaagttatcatcatcactaattgtaagaagatagccgccgttatcgtttgttattttcgaaagctgtgcgccgttccacatatttttatccgcctgtgtgacatggatgtcttttttattggcgtgagcgtctacttttgcttgagagcctgcatctgtttctctttggctccactccgaccaaacgcctttagtgctgaaacttcggacgtatatgggatttccggcggtcgctgtgtctataaacatttggacaaaagtcggtgatgctccgcgggttctttgcattacaattaattgtccgtattccgcaggcttattttccgtatgctgaaccgatatatagtagataccggacgtttttatattgtctaagtttgtttccgttaccgttttagcattcccgtcattgtcagtcagattgaataactgccctgcattccatttgtctttgtcagacttggttacatgaagatctgttttgtcggcatgctcatttacttttgcttgtgctccggcagctgtttcaaatggcatccattccgtccagatgccgtttttcagcgtttttctccaaaatcccccgtcatctgagaaagcggccgcctctccgttattctttgaagaataaaggtatataccctctgacggtttaggcggggtatttactccagttgcagctgctgagaaagtaaaggtcttattctggctggcagcggtctgatgaaaatcctgtccgtcagagatatcaataaaagcggagccattatcttttgtcattttagacaattgcccgttattccacttctggcgctcttccttcgtcacatgccggtccagatcttgattgtgctgatcaaaatctttttttgctgcctgctggacattgtccacgtttccgaggccgatttgcgcctttgtcgttttgtgcgggttgttcatgtcgtttttatgggaagccagatccgcgtgggcgtcttttatgcctttttcccagcggttgacgtcatcttcatttattggatcgtccggaagccagtctgttttttcttcgtaagccatcgttacaccacctcaaaggtaaatcttaaatcaagcgttctgttattgctgagatctaaatttgtttttcgttctgtgatgacgcttcctgtttcgtcaagcatctgcacggtttcaatgtgtttgatgtcttcttccctgcgtgtgagaacggtgactgcggcatcttttacggaaatatccgcaatcggagtttctttgccgtttaacagcacttttgtgatcctgtttttcagatcggctgcggcacgctgtctgtaagcggctgatatcatggtaagaccacctcgttattgttgagtgtgacggaataaccgaccttcagttcactgacttttcggtatctccgattgttgagaatgacccggtctttgatttccagtgtttcgtttaatgcggctctcagtgtaaacgccaaatgagcgggtttgattttttcaagcgtttcaatcagctcgttcatgtgctgcaggtcatcaagcccgatatcggcataaaaacgatactgccccggaaacatccgtacgtaagctgatggatgttttaaaaaacggtttagcgcctgctcaatcgcttgatgtgtgataggcggaatattcgacatcttcgaaatcagcctgagccgtctcatatcctccgtgtcacctgattcccgcggtatttttaatattttttcccagcggtcaagcccccacgtcgccgtcgtgataaagagctgatccgttaaatcgaaaatatcgttattctgccgctcaaactcaggagcttccgcctcaagcagttgtgccatctcctttaatcgggttaaaaacggcgggaggtacgccgtcatctcatcgagtctgctcaaggattgtcacctctttgagtttaggaatttccacatcactgagcacgaggttttccgccgcaccgttcattttgatatcggcatagtcactgacggatgccgagttataaacaatgttgttaatttgtgataaacggacggtgttttcttcgaaggccattttcttaaataaattcaggacacctttttcaatctccgcttttacgtcatcaatcgagctgttcagctcaggcagcacggaagcggagatttcgatttccttccatacggcgctttccaccgttactgccgctccgatcggcgcctgtccttctccctgcccttcgtccggatcaatataatcctttacttttttgatgagaatatctgatgccggttccaaattcgcatttgtgatgacaaccttcaccgttccggctccgttccaaagcggaaagatttttgccctgcccacgccgtcaacctcttcggcccattgtttatagtgctgtttatttgcgctgactgcttcccggcggacacgggtaaaatagcgcgcccttaagctgttgtcatcttcttcctcacggccgggaattaatatatcgcgcatgactgctttctcaagcccgggtatcgtatcaagcggcagcatgttctgccctgaaatgccggcattgccagcttcaccggctgtttcacattcaagcgttccatcccccgtatattgaaaatacaggttatcaacgaagaaacgggagcctggcggaatggtgatgcccgctgtgaattctccggctctgaccgcttttgtggcaggtgttcgttcaattcccgcttcagcagcacgcctgtccagaaattctccctgagccgtatcggagaacacgagctccagcacggtatcaagccaaatataagactttgcgagctcagcggccgcaggcgcgagcgcattgtaaatgacgctgccttctctcgtatcaatatccgccgtaacgcgcgccagcattctgtccataatgtcgtcaaacgtctgagcttcaaacatcctcacccagcacctcctctatctcaagcatgccctcatcagtttcaacggtaaaagagacgatgaaggcatcatcttttttctcaatctcaaaattggtaacggccaaaatacggtcatcatacagcaaggcttcttctatcagtcttgggatctccatttttttataagcatccgtcgtgttctgatctgaaagcacttcctgcagttcatttccgatatcatggctgaaaaccgaatatgaataccgttctgtgtgaagagcgatatagacgaattgtctgattgcgtccagtccgtttatcagttcattggtaatccggttgttttcaaaatcaattcggtaggtttgtgaagtctcaacggcctcactcgcatcctccaaatcttcaaattcgatttccgatgtcagggccattgcacccgctccttttagatttgttcatgtaaaaaagccctcttcggcagatgaagcggctttaataggctgatattctcgtgcatctccgtccggatgccggttaaattttgtccagtacaaagaaagactgtcctcctgttaaagcggcggtcatcacccgatctcccgcctggagctgatcatcttctccggatctcagccgcttcggcacaatgagtgcatcagacggaatcaaaagtttgtcgtgatctttcagtttcagctcgagcggggaaacggaggtcacttcggccggcatcagctccaccggcgcttcggcgtcaaccgctccgacggctaaatgtttaatggcatcacttaatctcatcaggatgtcccctccggcagtgaatttttctccgtgacgtcaatcgtcatggtatgttttgttccttggaattcatggcggtccgtatctacataataggttttcttcagcccgatttccggaattgaaatatagacaggcaacccgctttccaacccaggaataccgatcgcctgtatatttttcagctctttcttaacgccttttttctcagcctgcttcacttttgcgcgctgtttcagctgagcttcgttaatatcgtcagaaaccgtttcggtatactgcaaaacgccgaatgttttcatgcccgcgctgtctgcggcggaagcctttatcgttttattgtctttttgcagccgcatgacgacacgggttgcggtgtcatcaattgaggtgctgtattgataccctgtaatattaactcctgtttccagcacccatatgtcagacggctccggccattcacgcaagccgagcctgcctttttctgaatagagctgataattgcgccccgtctggctttttgtctgctttaacgcttttagcatcatatcgtaaaggcttgtatcatttttaaaaacgagtgatttaatggtatggcctgtgttagcaatggatgtgacgggaatttgaaaatcgctggcgatcctttttaatatttgatcggcgcgcttgttggaaaacacgtaaacgtcctggtttttcacaaggtattgaagcatatcgtatgcggtgaaggcgacggtatgctcatcgggcgttcttgcaaaaacaacgccgcggaacagttcttttccgttccatttgaacaaaaccgtatccccttctgatacgccgtaatacgtctggctgccctgctttacaacaatcgtcgcttcgatggagcggggcgcctgatatctgtgtccttccagcgttacgctttctgtgacaagctcgagccactccgtttcttttatgacaaatagttcaatcatcttttcacccgtttcattgcggtatcttcagcttctgccccgggaagatccaatgccccggctgccggatattccgtttgctgcgcttaatcatggcggttttattcgcgttccagattttccgccactccgtgtgttttccgtaaaacttgccggcgatgtcccaaagcgtatccccttttttgacggtatatgttttgggtgaagctttggacgggcgcttcgctttcgtttttttcttttgtttgatttttcttggcgaagcggttttatattctttcagtacgatatcaaaattccggtcgccgatttcattgtcaccttcgctgtaattaaagctttcaatgctgcatgtgacattgatttttgtccctgtaatcaaaaactgaacgggttttttcgctttcatccatgcttcaatggctgaaatggctttttccggcgaagggatgctttgatattcggcaatcgggctgtaccgtttcggaaaaaaagaagagaacgaaatttctttcgctcccggttcttcgataaacgtaacctctccaagtccggtgactttcacggaatcattctgcacgctgtttgcgatatcaatcgcttcaggaagaacgggaagccggagcttgtccttcccctgagacagccaaaattcgtaaacagatttagtcaaaagcaacggccccctttgctccggtataaatgtctttttgcagttcatcaatcagcgcctgtttgattttggcggcgaggctgtcggcgtcctgtccgttatggaaatgctgatcgccgctgaattcgattttaatttcttttgttcccgttttttgaacggtttggccgccgcctttaacggctgcggaaaccgtgccggctgagagcgccgccggttccgtctgggacggatcggacacttccatgccgagcgcctgagccgctttttgcagcagataacggccgcggatgccccgttcttcagggatgatccactctcgtttgttcccttcgccgacacgggcgatctgctccttggtaatcagacccccattggcataaccgacgtaagggcctccatgagccatacttttaatcccggggacattgctgatcgagccgtatcggcttttaatatagccgatagcggcagcggcgttgtgaattggatttctgatatcattcatgcccggcgctttgtgatcttcaaaggtgcttggaatcgtctgcataagcccctgtgacgggtgtccggctttggcgttgctgtcccatagattaatggaattagggttgccgcctgactcatgctgtgcgatcgtcattaatcccggaagccagctgatcggcgtattggttgctttcattgcggccaaaagccactctttgacgcttcctcccgctgcacccatgccggaaaaggctgctgcaagcgagcctgcctgtttttcggcgtatttttttacgtcaactgagctgagccctttgacgacgccgactgaagcaaagcgtccgagactcatcatgacacgggaaggagagtgaatatcaagctcttccctgaatgcgtcctcgacttttttggccatatctttggccgcctgtttgacttcgcttccttttgcagtcatccctgatacgaagtgtccgatcaggcctgacccccagccgttcgcggaatctcttgattgcacaaacggtttattgatatgtgtgcttacgtattgcgacgttcccgtatcttttgcattctgtccggccgaatatcctttcaccgttgcggcgccccatgatgacgattggttaaccgccgattgataaggtgttttcacctttgtttttaaaaatgaatcggtgcccgtcggcgaagtattttgacctttggcatagcccgcaacgacttgctttccgtaaccggatgaagacgaaatgagggcattgaacggcgttccgatgtttttttccttccagccgtccatatccaccgcttttttgctgattccgctgtcaaagccttcagtaaactgtttgccgagtgatgaagccgtcccggcaaatccggaagaatccacagacgctgcggccgacacagatgcagaagaagaaacaccgcccgctcccgccggaacagcagaagactgagccgaagccgcgcccatatcatcgacaacacgcatgccgagcttagacgcagcttgtgaaagcagcatctttccgcgtccgcgattgttgtcgacggggatgacaaattctttaccggcttcaccaatccaggaaatggtcggttttgtaatgtagcctcctgtggcgtttttgtccggttttttctttttatctccgccgcctcctgtgacaaaattcattatgcctgaaatcattttgccgccggttttatcccaaatctttttcacccagtcgaatgctgcagaaaaagcatctgatatggctgttcccacttttacaagaggttcttttatatgtttctcaaaccagctgcttaaccctttccatataccctttaccgtatctaaagcagtctggaaagcatctgatattcctttaccgacttttttcaccatgtctttcaccggattccagacagtatccatgaaccagccggaaaccgtactgaaaacggatttaattttatcccaagctcctgtgattttactccaaatggacgtcgccactccgacgacagccgattttacgggcccccacaccgtgctcataaaccagccggatactgtgctgaagacaccttgaatcgtcgtccacgcattcacgatatttgaccagatgctggttgccactccgacgacagccgatgaaaccggcgtccat

SEQ ID NO: 61 - DNA, 13081 bp, Bacillus amyloliquefaciens
ccaagtacttgggcttttcgctgtcgtcagcctttcagatgcgctttcagaaaggccagcttttccgtatggaaagaaggtatgtattcatgtccgaaataccggtaaaccttcaattctttttccgtttccagatgattgtaagcggcaaacaccgtcgacggcggagtcacgcggtcaatcagcccgatggacatgagcaccggaacttttacgcggtccgccagattcatgatatcaaaataggccagtgtattcatcgcggccttctccgtttcagggctgccgttctttctgaaaaaggagttaatctcaagatacggctcatcaagagcgacatcaatggcccgctcaaaattgcttaaataaggataatcggccgcaaccgctctcggaatgtcagatagtgccgccgcggcgattgaaagtccgcctccctggctcccgccgatgacggcgatcctcgtttcatccacttcctcaaagccgctgatgacttccaaagcccggacggcgtctaagtacacgccgcggtaataatatgtatctttatctaaaatccctttcgtcatccagccgggaacgtgtccatgcggtgagacgcttgtatctgtgctgctgtgctgaccgcggacaagcatgccgaatgcggcatatccgtgtagcgcccaatttacgatgtcatgtatatccccgtcatagctcgcgttatagccgtgatatttcacgatggccggatgcggtccttgccggtcgggaacggcgtaccatcccttaatttccgccttgccgaagcttcggtatgtcagccggaatactttcacgccgtcagccgggtagctttcagccgtcaattcaggctttgcctcttcctttgcaagctcatgtaatgatgatgcccaaaaatccgaaaagtcatgaggagcggttttatttggtttataggtttgcagttggtcgagcggcaagtcgtataattgcatatccgattattctcctttgttttataagatttaattttctgactctatcttaacacgattttacactcattttctaaacattttaataaacgtttgtttaaaaacaaaaaagccgtgcgctcacagcgtcacggctctttttacatcggctgatacaggtcccagccgatttttaacgtttctacgatataatcggctatttcttctggttccagattatccgtcgccacttttgaattatgtttatcatagatgctttggcgctcgttaaagagctgctgcatttcatccatggaacggttatgcagaacgggacggctttcaatcagcagatcagcccgctgcttccaattctcccatgataaatcaagatggagcacgagacagttttcaaggcagcactgtctgatttcctcttgtttaaacgaaccgcccccaagtgacacgatcttgaatttcgtattgcggcagatatctaatatataatccttttcggtctgacggaaaaaggcttcaccttttttctcaaacatttcagggatggacatcttgaaatctttctcaatctgcagatcaatatcaatgaagtctctgtataatttcttagcgaccagctggccgattgttgtctttccgacacccatgaatccgatcagtacgatatttctttctcttacgggaatggcacgttttgcgttcatcttcggcgaaatcctcctaagaaatgaaaaagttatgtttattatatgataactcaatattgaaacatagagataatgcaatgaaagaaaacccatcctttattaagaagagatgagtttttctttctatcggagcgtaatgcgttccacctttccgacaatgaaaatataagaaaatgccccgataaatgcgacagcgccgacaaacagaatcgctccgttatatgaaccggtcgcagaaacgataaacccgatgataagcggggtgataataccggccatattggcgaaaaagttaaacacgcctcctgccaatccgattgtctcgcttggcgccacctcactcagcatcgtccaggatatattggacatgccctgcgcaaaagaagcaatggataagatcgtcaaaaccgcaggagcagaatccgtaacattcgcgagcacgatggagcctgtcagcagaagaccgaggatgacgggcgttttccgggcaacgttcaccgacacgccccgtttcatcattccgtcagaccaatatccgccgaacaatacgccgaaaaaggcggcgatatacgggattgatgcggcgaagccgacttttaagaaagccatgtgctttgcctccgccagataagtcggaaaccatgtcaaaaagaagaacagcgtggaggctacggcgaactggccgatatacaagccgacaagcttgcggtatttaagaagctggacgaaatccggccacgtgatcctgccggctgattctgacacctctgtcagtccgccgccttctctaatatactcaagctcctcccggttcactttccggcaccgattcggctcgtgatacattttgaaccagaaaatggagaaaacaagcccgagcacccctgaggaaataaagacggcgcgccagtcaaatgccgttaacacccagaataaaaccggtgtggcgaacgccagccccacatattcccccgccgtataagcacccgtcgcaaaggcgcgttcccgccttggaaaccatgtcgtgacaatccggttgtttgccggaaacgcaggcgattcagccagcccgataatcaggcggcagccgaataaaaatccgaaactggccgcaaaagcctgcactccggtgaaaaccgaccagatcaataaagaaacgccgtacgtccgttttgacccgaatttgtccaaaatgagcccgccgggaatctgcattcccgtataagtccagctgaatgcggaaaagacgacgcccaaaagcgcggggcttatgttcagcgatgtctgaatggacggggcggcgatggatacactggcacggtctatataattaatcgcagtgataaaaaacaaaagaatcagtatcacataacgagcgcgagtcggtttattgcagacgggactgaagtccgtcagctccgtttcatttttcaatggcttctcccccttactcgaatgaaattaattgtacaacacttcggtcaattatttaatactttgacgcaaaaaagcgctaaacaatttgtgtgccgcaccgacctgatgcagacacaccccgcttataaaaaagtgtctgcccttttcacctgtttatccgtatcgcacccggggaaaaagtacacatatgatagacagttacgggaggattaccgatgaaactgagtttttgcacgacaggttttaaaaaaaagcatattctcgacatcatttctttcgcgaaggagcactcctttaagggaatcgaactgtggtacggacacgctaaacaatatatagaggaaatcggcccgctcgacaggcttgatcagcagcttcaggaggaaggcctcggggtgcctgccgtcagtttgtacactgacttcgccgctcaggatgaaaggcaggcgttaaaggatgttcaaagggcattaagcgcggcacgacagctgcacagtcccttgatcagagtctttgccggcaatcttccttcgcaccggacatcaccggaaaagtggcagcgtgcggttgatcaatttcagcaggcggcacggctcgcagatgactatgaagtcgatatcgggcttgagattcattacgatacgtacgcggatacaccggaggcggcgctggcatttttggaggatgtcggacatccgcgggtccgcaccatttttgacggctccaacctacacgtcaatcacgttgaccaaatgtccgctttagaaaaactgtatcataccgtcagccacattcatctgaaaaactatcactggaattttgacaactggtatctcagcaagccaactccgatttttcaaggagatctcgatcaaaaagcatttttaaaagagctgatgaacagacaatatgacggttttgtttctcttgagtattttggagaacatgcctttacgcatataaaggaatcgctccgcgaatatacgtccgttttttcccgctgactcttcgatcgaagggtctttttttgtatcatatagaaaaagggggatatcatggtgatcctttggataaatggggctttcggttccggaaaaacacaaacagcgtttgaactgcacagaagactgaaaccgtcttacgtatacgatcctgaaaagatggggtttgcgatgcgttcgatgataccgccggatatcgctgaagatgactttcaaagctaccctctgtggcgggaattcaattacagcatgctttcctatttgtcagatacatatcagggcatcatcattgtgcccatgaccattacgaacgatcaatacttccatgacattatcagcaggctgagacaggatggccggaccattcaccactttaccctgctggcttcaaaggaaacattgctgaaacgcctgcgcaccagagcggaaggaaaaaactcctgggccgcaaaacaaatcgaccgctgcatcaacagcctgtctgatagcctcttcacagaacatctccatacagaccaaatgtctattcagcaggtcgcagaaacgatcgctgcccaagcaaatctgccttttgagcctgattcgagaggcagccttcgaagattcaccgacagattgatggtgaagctgaatcatatccgtatcaaataaaaaaacgttttgaaaacatgtccctgatccatgcaaatggatcaataaataaaaagcccctctgaagggatgttttttcaatttaagaaaaaaattttagaaacagaagaggtattttatggataattgtctaattattaacaacgtaacacatttcatttgaaaagggagtgctcgaaatgaacttcaaaaaagtgttaaccggttctgcgctgtctcttgccttactgatgtctgccgctcctgcctttgccgcatcaccaacagcatccgcatccatggaaaatagcccaatctcaacgaaagcagatgccggcattaatgccatcaaactcgttcaaagccctaacggaaacttcgctgcttctttcgttttagatggaacaaagtggattttcaaaagcaaatactatgacagcagcaaagggtattgggtagggatttatgaaagtgtagataaataaaaatgcgataaacaaaaaacctcccttttaaaagggaggtttttttcattctatttccaccaatcatcaaacatcgatgccggcacctggcgcttatgctccgtactgaggtagcgtttttccagcgcctcaatcacttcggaagaaacgtccttgccttctaaataatcatcaatgtcattgtaggtgatgccgagttcggtctcatcagtctgctgcggtttttcatcaagcagatcggccgtcggtaatttcaaatacaggcgctccggcgcaccgagctcttctaataaacgtctgccctggcgtttcgttaatccggtcagcggcagcagatcagctccgccgtcaccgtatttcgtgaagaaaccggtcactgcctcggccgcatggtcggtgccgatgacaagcagcccctcttgtccgccgatggcatattgagcgatcattctcattctggcctttacatttcctttgttaaagtcagacagctgatcgcccgtgtcttttttgtactgatcggcgaacgcgctgacagcggacttaatatcaaatgtccatgatttatcaggtttaatgaatttgagcgccaattgggcgtcatcctcatcctgctgtgtgccgtgtggaagccggacggcgataaattccgcatttccgccttcttctctgatgctctcagccgccaattgggcgaggcgtcccgcaagcgtggaatcctgccccccgctgatgccgagcacaaagcctttggcacctgtttttttcaaatattgtttcagaaagttcactctgtcctcaatttcttgtttcggatcaattgagggctttacatggagatcattcataatttgtttctggatgctcatcccaatcactcctcctgcattgtttctttatgatccatttcccgttcatgctgaaaatgaatcatgccactatgtacgactctctgttaaatatagcacaggtgcggattttaagtgaatcaaatacaccgggatcagctgatttccacccgcagcgccgtgatgctgtctccgttgcattttcctttttcgatcggacaggatgaaaacgcgacgacgagatccatttccgcacggagccgtacataatcacccgcgtcagaaagaggcgtttcgactgataagttccctttctcatcgagcaccgtgttcataaagatggcaaacgggtaatgcatatgcggccgcggcaccccgaacggttcaagcgccccgctcatattgtcataacacgtatcctggagttcgtctttatgctttccgtataaaagtctgttcatatccggacggcaggcgggaagcagcagatcgtgcttaccgactgtatcttcaatcagcgtcagcatcggcttgtataaatttgaataaatatgatcacccgtttttacatgaatggactggttggcatcaatcgtcgcgccctgatcaagatgttcataaaagtccttggcatgatacgccgtgaagtcagccacctgctgtccttccacatcgacaacttttataatctgccctttgtgaaccttcaggccgagcccttttttcggcggtacgataaattgctgtgtcatcagactgctccttttttcttctattatgaactccgtccgtttgtttcatgtaaagcaatttattggatgtatattccccttctgacggctgcaatctaagctttgataaaggggttgaacttcatgggtaaatcacaggaccagcctaaaggaaatctcgcttggtggcagctctccttaatcggcgtcggctgcacaatcgggacgggcttttttctcgggtccagcattgctattgtcaaaagcggatattccgcgctgatctcatttcttattgccgggcttggcacctattttgtctttgagcagctcgcgaagctttcggctaaacagcccgaaaaggggtctttttgcgcttatgcgagaaaggctttcggcacttgggccggtttcagcaacggatgggtgtactggtcgtccgagatgctgatcacgggaagccagctgacagcaatctcgctgtttacgaagcattggtttccgaatgtgccgctgtggattttcgcctccatctatgcggtgctcggtcttttgattatatttacggggctgtccgtttttcaaaaaacggaaaatgtgctcgctgttgtcaagacggcggcgatatttatgtttatcgtgatcgccatattggcgctgtgcggtatattttctcataaaccggatgtgcaggtgccgaacgaatcaaaggatttgttcccgcacggagcgatggggttatggacgggactgatttatgcgttttacgccttcggaggaattgaagtcttggggctgatgaccgtacacttgaaaaaaccggaggaagcctcaaaatcaggccggctgatgcttgccgtacttgcggtgatttacgtcatttctctcggcctggcgctgctgttagtgccgctgggcaaattcaccgagcaggacagcccgtttattacatcgctgaagggttttcatttagatatcattcttgatatttttaacgggatttttattattgcgggattttccacgctcgtcgcctcgctgtttgccgtgacgacattgctttgtacaatggccgatgacggggatgcgccgaaatgcttcagattaaaggaaaacaaaaaaatctgctggcctgcgctcggattgacgtttgccggactcatcgtctccatcatcctgtcattggtgctgccgaaaaatatatatgaacacatgacaaccgcagcgggcctcatgcttctttatacgtggctgttcattttgttctcgggcaagaaactgctcgaaacgacaaagatgggaaccgcacagattgttatcgcccttgtgctgattgtcgcggccgtctccgggacgctgtttgagaaatcgagccggcccggttttctggtcagcctttgttttctcgccgtcattgcgatcgtgacatggatcgtacaaaaaaagcagggacacagccctgccggatcatagcttatttcgtcggtttaaatagtcttttcaaataagaaaagggacactttgacacttgcgtctcatcatcacggaggaaatattgcttccattctaaattgtcttttcctccgtaccaccccaatcggggatgaagaggggcttcatcatacgcctctaagcgttttctgatcagccggctcatgtttcgtccgaacgcggttgaatcatttaatccttcgaaaatccatctcggctgaaacgccagcataaaaaacgggaagcttctgctttgtcgcgcttcatgcgcaggcgtcgcgcacagaataaaatacggctcgccgtcaaagcagaactcccatttataatgttcagggtcttccggcatatcttccggccagtcattcgggtcgcagccgctcagccggtttaaaaaagaccagaacagctcttcatacgcctcaattgaataatgctcagctaaatcctcaggcgtatcaaaaatcacaagcagcgacgcgtatcttccggtattccttgagatctttccgtactcggacagcagcatccccacttcctccggggttccgtcttcgcggggatcacccgcaaaggatatccggagctgatctgtcaaaaatccctgacgtccgggaatgcacggaaacgtatccgctttatcgcctactttttctgatagaagctcaaaagcgattctctgccaatttggcagatccaataacttttcctcaaggcaactttttgtgtacagcccgcttgccatcggcccacctccagtatcgtcatgatacgttatgacggagataggcgatgggtgactcttcttctatttatgagatgagcatttgaatcccctgccatccgaaataaaacccgaaaacgatcaaagacacacccgccgctcccgtcagccagcggagcgctttttcatgaaggagatttctgaaagtgctcgcggcgaccgccatgcagaaatcccagatcaaaatgccgagaagaatgccggagctgtaaatcaaaagctgatttgcatcgaaggattcagcggttttggcgagaatgctcccgtatatgccgagccagaataaaatgctcagcggattggaaagagaaataaaaaatcccgcgccgaatgttttgtaaaaagccggttttccttttccgcttctgacattcatggcttccctgatattttttaacgtttcgactcccgtataggtcagcacgaaaaaaccgaagagccacaaaaacgtttttacaaaaggagcggtcaaaaattgagacagcccgaaatagatcagaatcatatacagcccgtccgcggccatggcgccaagaccgaaaatccatgcatgccaaaagccgtttttgatgcctttgtcaatttgcgctgcattgaccggtccgacaggtgctgacaatgacagcccgagaacgatgtagcttaaaaagatgttcattggcttccccctcattcatgcaacttgtacaagttattcatgaatgggccgtgctatgatacattattttaatttctcaagctcgtcttccatcatgtccgtcgcttttcctaaaaaatcgaatatcagctgcagttcttcttctttatattgtcggcaaaggctgatcgtggactgggataaggagctgaacaattgcttcacattcgcttttccggctgtcagcggcacgatgatcacccgacgtttgtcttcggggtcttttttcctcatgacatatcccgctttttcgagccggtcaatgagcgccgttaccgaacctgtgctgaggccggtttttttccccagctcgcctgcggtcatcgggcctgcttcatttaagatatcagctgattttaaatcggtcggaaacagaccgagagattgagcggccgcctgatgaaacaggatcgtccttgtggccatcttccggaataactgtatcgcggtttcctccgtctcgcttctggtatttcttgttgacaactgacaggcctccctataaaatcaatttatcttgacgatcaagataattttcggcaaatctaatatgatcatagcaaatttaatgatcaaaagtaagtatgggaggaaaaagcatggaacaaacagacgcgaaggacgcctcgacgaagtttgtcgtcatcggtcttttgctgggcattttaatgtcggctatggataatacaatcgttgccactgcgatgggaaatatcgtggcggacctcggaagtttcgataagttcgcgtgggtgacggcatcatacatggtagccgttatggccggtatgccgatttacggaaaactgtccgatatgtacggacgcaaacgtttctttttattcggtcttattcttttcttaatcggatctgcattatgcggaatcgcccaaacaatggatcagctcattatttaccgcgtcattcagggaatcggcggaggcgcgctgatgccgatcgccttcacgatcatttttgatttatttccgccggaaaaacgcggaaaaatgtcgggcatgttcggtgccgttttcggcctgtccagcgttctcggaccgcttttaggcgcgctcattaccgactccatcagctggcactgggtgttttacatcaacgtgccgatcggtattttatcattgtttttcattcttcgttattataaagaatcccttgaacacaggaaacagaaaatcgactgggccggcgcgattacgctggtggtttccattgtcggtctgatgttcgctcttgagctcggcggaaaaacgtatgattggaactccgtgcagatcatcggtctgttcgctgtgttcgccgtgttctttatcgccttttttattgtggaaagaaaagcggaagaaccgattatctcattttggatgtttaaaaaccgtttatttgctacagcacagattctggcgttcctttacggagccacgttcgtcattttagcggtgtttatcccgatcttcgttcaggctgtgtacggaagcaccgctacaagcgcgggctttattttgacgccgatgatgatcggttctgttatcggaagtatgatcggcggaattttccagacgaaagtgcggttccgcagtttaatgctgatttccgtggtcgctttctttatcggaatgctgctgctttccaatatgacaccggatacggcgcgtacgatgctgacggtattcatgctgatctcaggattcggcgtcggcttcaacttctcactgctgccggccgcgtccatgaacgatctggagccgcgttatcgcggaagcgccaactcaacaaactcgtttttgagatcattcggtatgacgctcggtgtgacgattttcggcaccatccagacgaatgtgtttaccaataagctcacagattcattcagcggcatgaaaggagcgggcggcgcgatgcagaacataggaaatccgcaggacattttccaggccggcacgcgcgctcatattccgccgcacattctggatcgcattattgacgccatgtcgcaaagcatcacatatgtatttacgcttgcgctagcgccgatcgtcattgccgccgttaccattttgtttatgggaaaagcgagagtgaaaacctctcaggaaatggcgaaaaaagcgaattaaaaaaagcagtacatggcgtttgtcatgtactgcttttttatttacccagcgaaatgcggagcgagaatatctttcagcacgtttgcgctgcggctgaattgagcctgttctgtttcattcagctcaagttccgtcacacctgcgatgccgttccgattgacgacggccggaacgccgataaagacgtcgtttacaccgtattggccgtccagatatgtgctgacggttaaaatgctgttttcattacgcaaaatcgcttttgtgatgcgggcgaggctcatcgccactccgtaatatgtcgcgccttttttctcgataatatggtaggccgcgtttttcacatcgtcaacgatctgatccagctcgtcctgtttgtaagctgcatttttctccagcaattgctgcaccggcactccgccgatattggcgtgactccatacaggaagctcggtatcgccgtgctcgccgataatgtgggcgtgtacgttttgcggagcggctccgaagtattcgctcagcatataacggaatcgcgcagaatccagtgtcgtgccgctgccgatgacgcgttctttcggcagcccgctgaatgtccatgtcgcataagtgagaatgtcgaccgggtttgtggcaacgaggaagatgccgtcaaatccgcttgccattacttcaccgacaatgcttttaaaaatggcgagatttttttcgaccagctcaagtctcgtttcgcccggtttttgattggcccctgcacagatgcacacgatatcggcatccttgcaatcctcatatgtgccgtaagacgttttgaccggatgaggcgcaaatgcctttccgtgatttaaatccatgacatctcccatggctttttctctatttacatcaatgatcacaagctcatctgtgatcccttgattaattaacgcaaatgcataactgcttccaacaaaacctgctccgattaatgctactttgttcactcgttcgttcatcatgtatgctcatcctccagtgtttcgtggtgtctgtttttatcttgtgaagtatttcacatttatattgtgcaatacttcacaaacttttgcaagagaaaagtttgatttttggacaaaaaaatatcggtgatggtttccagattgttgacaacatcctaaaacg

SEQ ID NO: 62 - DNA, 30358 bp, Bacillus amyloliquefaciens
cgataatggcgatatcttcatcttgcggcacactgcttttccgccttttttctgtttgcgtctcaaccggcttctccatttttgccggagacgcgctgaaatggctcccgtactgctcagtcaggaaagccgccagctctgctgccgtcgtatattcaaacagcaaagtcggagaaagggtttctccgattttttcgctgatcgtttcgacgacgtcaagcagtccggacgatgtcaggcccatttcatagtagccgacttgagaatcaatctgttcaagcggcttgccgattttttccgccatcagattcatgacataccgctctgcttcctcatgcgggtgtccgccttcaagcgatgccgcaacttccggtaaaccggctttttcaggagacttctcagcaggcttacagtctgtattgatcagctcggcatcccgcacgagcttgcttgtgaaatctttcagctcggctactttccggccggatgcgttaaaaaactccagtgtaatgtaaataagctccttttcctgccgaagcgacgaacgtttgattctcgtgatgcagccggcctgcaaaggttcagaagctgtaaaagattcgtagaaaagaggcagaaacagcctcttttccccatttaacaacgatgagatcaataggtttgcgccgacgccgcttccgtcaagaagagtcggatggaacaaaaaccctccggcctgtcccatcgcgtcttttccgagcgatacatcaaaggtgacgccgtcccactcctcaaaaacttctccttctgctttcatatatccgctgtgaaccaattcctggcttctgcattgtgcatacagctcatttaaattgatggtgcgttccgcctcgcgtttgacagagtcaagatcaagcgtgtcactgaaaactgcgggtgccgtctcgtgcatttccgctttgacgtaaatgcgttctttcggctggactcgtccgccgctgacctcagccccttttgcggtaagtttccagcgcccttcttttacctttgtacattcaaccgtaagcttgacggcgctgtcttctttcgcaataagcggctgatatatggataaatggcgcagctgaagcccgtcgtatgaatagccgcgctctttgaaaatctgataaaacatatcaatataagccaatcccggaaggactttttgtccgtaaacgtcatgatgtaaaataaacggatttttcagcgataaagtgatttgcttattgaagttcttcacgttaaacctccacttcataggtatcccagatgtttgccgcagctttttcgttcgtttcttctttgctgtccggcgaaatcagccgcttatttaatgcaggcggtgttaaaggatggcgcttgattcggcgcccttcgtcttcctgccacgcttccacaatgacgtgggcgtttgttccgccgtcggcaaagcagttaattcctgccgccggcattggtgacggccagtctgccagagtgcggctgaactgaatattggccttttctctatcaaaatgtgtgttttcatgctcgcctgataaaaacgggataaagctcttttctttcagcatgagaacaacttttatgaaacttgcaattccttccgcgcaaagcgggtgcccgatgttcggtttcacagatccgattccgagcgggccggcgtcttttgaacggtagacggattgaatggccttcagttctaacagatctgtcacgaccgtgcctgaaccgttcgcttcaatatgagtgatgtcttccggctgttttccgcttttttcaagagccgtcttcatgacggatttttgcgcttccagactcggcgtagccgggcctgccgttcttccgtcattattgacggatgccgccttcactacggcataaatagaatctccgtcttcaatcgcctgcgacacggtttttaaaagaaccattccgacaccctcgcccagcacgactccatcggcgcgttcgtcaaatacatggaacgactgcgctttacttaatatgccgcgctgttcaaataatttatgggtttcttctgattcaaacaggctcaccccgccgacgacggccgcttttatttctcctgttacaagagcctgcacggccatattcattccgactaaagcagaagaacaagccgtatcgaggacaacgctcgggccgcgcatatcaaaatattgagagagatttgcggccaaataattctgacccagcgcgacgatcgggtttttcgcatccagcagtttctcttcacccggtctgtgacggctgcgtccgccgagatacacacctattgcttctccctttatctcatccggcgtatagccagcgtgataccacaggttaaggcattcttccagagcggccaaagcttgagggtccattgcctttacatcttcttctgccagtaaaaagaagtccggatcaaattgatgaattccatcaagcattcccgcgtaataaggcgtcttcaacccccatcgctcagccggaacaggaccgatagccgaacggccttcagccaaaagcgaccagtacgcctctaaggaagccgctcccggaaaccggcaggacatgccgacgaccgcgatatcttcccggtgaatctgttttccggccggctcttcttgcaccttaacggcttgtgtttcaatcaccggctcagccggcttcttcttaacaggctccgccgccaaatcaaacagttccgacaaaacttctgtatatccttcgagaagccaatttgcgaaagattgaatcgtcggatattcatacagaatggacgggtcaagcgatgccgagagattccgattgatccgctgcagaagctgagcaagaataatggaatccactccgtaatcttggaataatacgtctgtctcaagctgatcctggtcaatccgcagctcttcagaaaataattctttcagccattcttctgttttccttgttaattgagcgttgtctgcggcagcataagcggttttttccgccggttttaccatagccggactcattggctgatcctgcctgctccgccgcaggaatcgctccggcttccacagcttaggattcagaacggccggcagcactgggccccttgctgattcaagaagtatgccgtcaaggagctgtaatccttctgcattcgtgatgctatatagcccgctctctatataagctttgtttgttacttcgcccattccggtttctttccagttcggccactgaatgcttacgatcggcagctgctctttgtatgagtttgcaaaatagtccatatacgcattggccatggcatagtcggcctgtcctgccgaaagcgccggtatcgcagctgacacggaagagaacaagacgaaaaacttcagcggctcttcgctgagcacactgtataacgcctgaagcccgtctactttcggctcgagcacgcgctgtatgtcttcatcggtttttctgatgaatgcgagcgtctctttatcggtcacacccgcgcagtgaatcacgccgccgatatttccgagcgtctgttttatctggctcagttcctgtctcagcccggcttcatcagctaacgggactgacaaaaccttcacttgtacacctttggattccaagtcgagaacagcttcaattttcgcttttacagaagccgtcaccccattcagtccgcccgtccactcacttcgcggcggaagggtctcacggcctgtaagcaccagttttttcactccgtaatgttcggcaaaatggcgtgcgcataaaaggccgatccccctcgtccctccggtgatcagaagcacatggttgtcgggaaaatcaattctctcgccttgcatatttatattttctgatccgctcaatacggcgcggtagcgcaagccgtccctccggcaaacttccgcgtcatcagtacgggcatgaaactcatcggcaatctgcttcgccagtttgtcatccgaaagcgctccttcaaggtcgagatgccttgaagacagatgaccgtattcgcatgccagcattctgtacagaccggcccgttttgctcctgttgtttgattggcctctttatttaatgactcaaggtctttcgtgacacaaagcagtgtcatcccttctttatgcccatgctcaatcaattgctgaagccatttgattccggccatgtcttgagaatcttctttcgctgcgccgaggaggtcgatgactccgtcaaacgcctgccagtcatattcaccggtaaggtctgatgctgtgatgatacggtgattcggcatgtgcgctgcgatctcttctgcgagattaatcgtgtccccgcctgtcaaaatcgcaactgaacgtgcgcacggttcacgcagttcgagcgggctcagttcccattgtttcgtcagaatacgtttcatccgttcctctgtatggaccttatttttgtcaggattctcaggcacccaatacgtgtcttttgcgaacggataagacggaagactgagtaaacgcggcgtacccttttcatacagccggttccaattcaatacgccgcctttcacccatacctctgccagcttggcgaattttccttttctgatccaggcgtcaatgacgatgtccatatcttcatctgccgtgaacaaggcaaacgtatctttatttcggtgagactggccggtatacagcccggcgatgtttttctcatttttcgtaaatgcttccagctttgtttccaattccgccatcgtcgctgcaagaatggccaagcgctcttccatttcgtcccttccggtttgcagcgtataagcgacgcccgccaagtcttgatctgtatacggcgtttgacggatcgctttttgcagctgctgcgcctgttcaaacagtttttcttttgatttggcggacaaaaggatgattgccggattttccgggctgtgctcaggctgagcggctgctttcgggacatactcttcaatgacgatatgggcgttgaccccgccgatgccaaatgagctgaccccggcccggcgcggaatggcatttccgttgctatcttttcctgccgtccattcctgattttcccgcacgatgtagaaaggactgtcatcgagctgaatgtacggattgatcgtctcgcaatgcaggcttttcaccagcgttttatgtttcatttgcaaaagcactttcatcacgcctgatactcccgcggcaagctctaaatggccgatattgcttttgaccgaaccgatgccgcagcggtgaccggagacttcaggctcttgatttgttttcgccagctcgtgaaacgccgctttcaaaccgtttatttcaatcgggtcgcccaattccgttcctgtaccgtgcgcttcaatatacgtgacggtgctcgggtccactcccgctttccggtatgctttcaccaataaatcagcctgcagtttcggattcggcgaggttaacgtattcgcccggccgccgtggttttcagccgtaccgcgaatcacgccgtaaatcggactgccgtcacgttctgcatctgtcagtttcttcagcatcagaattcccgcgccttctcctctgacatacccgttggcatctttggagaaggttttgcattttccgtctttgctgagcatgcctgctttgctgtagctgatatgcgcttcttccgtcagaatcgtattgattcccccggcaatcgccatgtcgcattctccgttttctatagcggataccgcccggtgaattgccacaagcgagcttgaacatgccgtttcaatcggctcgctcggcccgtgaagatttaacaaatagctcaaacggttcggacctatggaaggaatcatgctgcctgtcgccgcatgtccttccggcgctagacctgcccttgtgaacaaatctttataaccggtatttccggtgccgataaagacgcccgtatttgtgccggaaaggctttccggcttacagcccgcatcttctatcgcccgccatgcataagtcaataacagccgctgctgcggatctaaatattgggcttcccgcggtgaaatcccaaagaacagcggatcaaattcagctattccgtcgataaagccgccccacttgatattcgttttattcccttcaagattcgggtcgccatcaaacgcttgccaatcccagcgttctttcggaatggttgtgatcgaatcctttccttctttcaaattgcgccaaaattcctctatatcctttgcacccgggaatcggccgctgattccgacaatggcaaccgggtcattgccgcgcggctcttgtgtcgctgccgcagcgttcattaccgttgcgaagcgctttttccgctgcattttcggtttttgggcttttggctgcgctttttccggagactctttcttcttttcgccgaaacggcccggatgctcttttgccaaatatccggcgagaccgctgatcgttccgtactcaaagaaaatcgtcggcgccagctccagctgatacgcttcatttaattgattcgtaaagacagtaaacgatacggaatcaaaaccgtattcactcaattccgtatctgtctcaacgtcctcacggtcaacttttaaaatgccgcttaccatggctgtcaaagcggtgtgaagcgtttgaagagattcttctgcatcgtgtttttcttccggctgagaaggaaggccggcttctgcctcatccgtcaaatactctgctaaactgcggatcgtcccgtgttcgaagaagatcgtcggcgccagctccagctgatacgcttcatttaattgattcgtaaagacggtaaacgatacggaatcaaaaccgtattcactcagttccgtatcaatatcgatctcgtcttggccgacttttaaaattgaactgaccaatcggataagcgcaccgtgccatttgtctcccgaaacggcggatacaggctcaattttctccacctgcggcttttcagtttcagaaacggataggaacgactgttttaattttgcagcgtgtccttcagctgctaaaagctgcggcttttcctgagccattccttcataaaatgcagccaggcctgacgccttttgaagcggaaccatgccgaaagcttttttcatcattctctccgtctcgtctcccgcctgcataccgccatctttccacagcgtccagttaaaggcgaccgtttttccgtgccgaaggccattctccgtaagggattgcctgtaagcggcgtatgcatccataaacgcgttgccggcggcataatcagcctgcccgacattgccgagaacgccggaaacactggagaacaatacgaaaaagtcaagattgcagtctttgctggcttcatctaaataagcggttccgatgactttcggatcaagcacttccctgaactcttccttcgttttttgcagcaggaagcggtcttgtatcactcccgcagcgtgaataattccgttaagctttccgaattccgccgtaatctcttttatcagcgcttcattttcccgccggtctgccgcattcagctttttgtagacgacatttgcgcctgagtgctgaagcatagcaagctcacgctgtttggcttctgacagatttgagcggccggtcagaatgattttcgggtgttttacgcgacctgcgatttcttttgcgaacatcaaccccaggcttcctgcccctccggtaatcagatatacgccttcgtccttccagacgatgccgccccctgagggatgcatttcttcccaagccttcacataccgtttttctcctttataacggatatgtttatcatgcggccgatgactgtcgtttttcagtttttgagcgacagccggcatttcgccgattgattccatttcgatgagctgacagtcaagttttccgtattccagctcggctgtttttaacaaacctgttaaccccgcaaacaattgctggctgccgtctgctgaaataacagtctgaatcagaatgcggccctgccttttttcgctgatgatccgccggatgtgttcagcgattgtctgcgcaaagctttggaagcgttcagcggctgtttcaccctcaccttctgcaatcagcagttcggcgtctttcaggccggatgccgctttatcttttatacggcaggcatcttcacaaagtatgatcaaatgctcatcagcttggacagaagcttcttcggatgcggcggcttctttccaaaccggtgcaaacaagaccttttccgagcctgatggccgctgagccgattctgcatcgccttcaagcactctcgtagagaatcctctcaccttcacgcaaagcgctcctgtttcgtcgaacaggtcaatgtcggctttctgcacggaatcaccggtttgatatccttcactgaagcgcgcatgcgcccgcatagtcggcgtgcatgctttgatgacttcaagatattccagcgcaaacggcagaatcagcttttgtccggaaaactcctgcataatgcagatcgtcgccgtctgaatagccgaatcaatgatgctcggatgaagcgtaaattgtccgttcgtatgagaaacagaatccggaagctgtatgtccgaaagcacttctttctcgccgataaaggcggacttaatgccttggaaggcttttccgtggaacatccccctgctccggccttcccgataaaaggccgccggatcaagaatgtccgctgtgcatctgttttgtatggcagaaaggtcggtctctggctctcgttcagcctttatgatttcggcccgtccttggctgtgcagcacttcttcatcgtcagcgtttacgctgtaaatgtcatatgagatgatgccgtcctcttcagggaacagtgcaatatggacctggcgctcttgttcgtgaacgacgatcggtttcatccagacggtatgatggagcgttattctgtcttggtcttttaataagccgccaagcgcccgttttaccgcttcataagacatttccaaatatgccgctcccggaagcaccgctttttccctgaccacatgatccttcaggaaaaattctgagcctgtaaaccgtgagctgaaccgctgaacggccaaatctgacgtgttttgctgcacgagcgggtgtaaaactgagattccggtgtgtgcggcagatgttttcttttctgcttttttcggccagtacggctcctttgcaaatgggtagaccggcacgctgatccgtttcggatgcttgtctttgtaaagcttgtgccaattgatggcgacacctttactccacatttcacagagcttcgttccttttcctttcgcaagccatttctcaatgagttcagcactgtcatcatcatcagaaagccaggcaatatctttcgcctgctgtttttctcctctgaagcagcctgttacagccggcttatcattgataaaatcggcaagctgccgcttgagctccgcagtgccgcttgtgataaaggccgcgcgctcttccatcgcttcccttccgacttggaacgtgtaggcaagatcagcgaggccggcgtccgtttttctttccagaaaagccagcagctgttttgcgtactccttcagacgatctttttttctggcagacaacggaatgatgaacggaccggcagcgtctgctgctttagatgcatccggatattgttcaaaaatcgcgtgtgtgtttgttccgccaagaccgaaagagcttaaagccatgcggtgcgctctgttctcacgggttaactctttcttttcttccgctacgtaaaacggagagtcttctaaatgaagattcgggttcggctctttgtaattgatgctcggcgcgatttcctgatgatataagctcatgacaaccttgatgcagcccgccattccggccgctgtatccaaatgcccgagatttgttttgactgaaccgatgccgcagtattgttttttatctgtatattggccgtacaccgattgaagcgcggacagttcgatcggatcgccgagttttgttcccgtgccgtgagcttcgacgtacgcgatcgtttcgggatggatgcccgtctgatcaatgaccttctgaatgacctcagcttgtcctttgacgctcggcgcataaaatccgaccttatccgctccgtcattattgacgccgattccgcgcagcagtgcataaatatggtcgccgtccttaacggcatcagacgctttttttaagagcacggcgccggctccctcaccgccgatcattccgtcagcatccgcgtcaaacgctttaatatgcccgtcgctcgaaaaattcagccccggctgatgaacatacccggcgcttgtttccgtatgaagggtcgcaccgccgacaagggcgtacttggcttcgccggactgcaggctttgaaaagccgaatgcaggccgattaacgaagatgagcagttggcatggacaaaatagctcggccctttcaacccgagtttatgagaaatcatcgtcggaatcgtaccgctttgggcaagcacccatgacacgtagccatccggcgtttccagctgtgctgtcgtctcctccggctgcaggctgcggtaagagttcgtgctggcagacatatacacgcttgtttccggaatttctttggagatataccccgcatcctcgattgccttccatgaatggagcaaaagcattctcagctgaggatccatatattccgcatctttcggtgaaaagccgaagaaaccgggatcaaacatttctttcccttctaaaactgatttagccggaacgaagccgggatgatcagccagttcttcagaaataccggatcggcggagctcctcttttgaaaagaaggtgatgctttctttgccttctttgatgttattccaaaattcataatgatctttcgctcccggaaactcacaggatataccgataaccgcaaggctgtcctcgtaataatcgggaaattctcccgccggatgttcccggtcttctgcattcactttcttttgcggcacaggagcccaaacggcttctttcggtttttgttcagcgatataccggctgatgtcttttaccgtcgcgtattcaaacagctccgttacactgaattcacaatccagttcctgcgtcatccggtcagtgacagtcacggcaagaagcgaatctccccccgcatcaaaaaagcggtcatcaagctctatatctttgcttttcaatacatcctgccatatcgccagcaccgcctgctggatatgagatgatgaaaatgtttttgtttccggctgtttttcggtcagatcgcgggcagcaagaagcttgcggtccacttttccgttcggcgtgagcggcagctcttcaagacggataaacgaagctggcgtcatataggccggcagcgcttgtttcaaatgattgcgcaattcctttgcagacggaagcggctctccgtttttccggatataaaacgcgcaaagcttttcatttccggagtgattgttcacaacaactacactttcctgtacggccggatgggcattcagccggctctcaatatctccgggttcaatgcggtatccgcggattttgacttgggtatccatccgtcccatgtattcaatgcggccgccgggaagaaaacgcgccatatcgcctgttttataaagctttgatcccagttcgagccggtggctgacgaaagctttatctgtcagctcaggcttgttgaaatatcctcttgccaatccgtctcccgcaatacaaagttctcccggcaccccttctaaaacagggttgagaccggaatccataatatacacacgggtattggcgatcgggcgcccgatcgtaagcgcgctctcattttccgttatacgctgcaccgcggaccagattgtcgtctctgtcggcccgaacatattccaagcctcacttttcgtatcgagaaactgctgcttcaattgttcgctgagcgcctctccgccgcaaaggattttcactttttcttcatttgaccatccggaatgaaagagcattttccacgtaaacggcgtcgcctgcatgatcgtcggtttgtactcttgaatcagctctttcagcttccgtgcgtcttttgtgacttctgtcttacagatgttgcactctgctcctttgattaaaggaaggtaaagctccagtgccgcgatatcaaagcaatatgtcgtgacggcaagcagtttgtcttcggacgaaagccccggttcatatgccatcgagattaagaaattggtcagggcccggtgcggaatcatcacgcctttcggtttgcccgtgctgcccgacgtgtaaatgacatacgccagatcgtcaggtgtcactaaccgcttcagcgacgttctttccgcggctgtgctttcaatacaagaccaatcgcggtcaatggcagttgtctgcacgcctccccagttcaaagagtgctctaaatcagctgtcgtcagacacattgaaatcctgctgtcggcgatcatatattccaatctgtcagcgggataagaaggatcaagcggcacatacgctcccccggcttttaaaatgccgagaaggccgacagccatatgcaatgatcggtctgtataaatgccgatgagatcatcagggcctgcaccgtgcgcctgcaaatagagcgccagcttcgtgcttttttcatcaagctcacggtacgtcagcttttgctgttcatacacgaccgcacaagcgtccggcgtttctgccgcctgacgttcgaataattcatggaagcaggcatccggatattcacggcttgtctcattccaagtcttaagaatcatgtgctcctctctttttgtcatgagagaaacgttctcaagcggcatatccggattcgccgtcaaagcttcagcggcctgtacaaattggctgaaaagtctggccgcccccgcttcgtcgaataattcggtgctgtatttaatcgtaagatccatgcctgatgcttcttcccacatttcaaatacaagatcatattccccctcctgatgaatgtcttttacaaactcacaggagaattccttgtattcatcaagcatcgattgatagcttgaatgctgcagaaagttctgatagaaaaaggcattgctgaaaacaggcgaaccgttctgccgggggttcgcatgcacatcacgcaccattttcggaaacggataaaaggagtgatccagtccgtccagaacggcatcctgcaccttttgaacaaagtcagcaaatgtttcttttcgtccggctctgctccgtatgggaagcatgttgaggaaatgcccgaccactccgtcaaagcgttcttcgggtctgaccattgcaggcatgcctgtcacaatatcttccttatccgtatatttgcttaaaagcaccatgtaacagctcagcatgacggtagacaaatgaatcgaacgggatgcggcaaacgccgttatattattcagcagccgttcgggaagacggcgtgtcagcgtatcttctgtaaactccggaacactgctgtccgtgcgcgtcggcggaagctgaaggtcaggcagatcgcccccgagctgtttcatccagtaagcgcgggcagctttgctttcttcacccgccaaataccgcttttcccaagccgcgaaatcgggatgaatgccgggagcggcggccataaactcttcttttccctccagcagcgcctgataatgatccagcagactgtgaataaatgtaatggatgaaatgccgtcaaacacgatgtggtgaatgaccgtcaaaagataatgttcctcggcggattttgaaagcagctgcacgcgcagcaaaggtccgccttctttgacaaacggctctttcacttttttccgtatcagagcaggtatttgtgattcattgacgtcagatatatcttcttccgagaatacaaaaggatctgccgattctatgaaatataacccgccgtctgtttcattcacggcgcttttgagcatcggatgctgctttaatacgagctgaaacgcctgtttcagtttctctttgtcgattccggatgtgaatcggaaacagagcgggacatggtatgcagtcgtttcaggcgacattttctgcaatgtccacagtcctttttggacttctgaaagcgctggcgccgtttgccgtctctcccgttctgccggcggttcggctttttggggatgatgctccgctgacatgtttgccgctttttcagcagtataagccgctaaagcgccaatcgtcgggtttttgtgcagctctcttgccgtcagccggatgtgatacgttttttcaattgatctggcgagtttcatcatcttgatggaattgacgccaagactttgaaacggcgtatttggatcaacgagctcatccgcgatggaaagttcctctttcagaaaacggataaaatcccgttcaatatctttctctgcagaagccgtgtctgaattgccgccttcttgtctgttattatgtaaagaatcaaattgcccttgttcaaatgaatgtttcagctgagtgcgctggattttcccgatcgccgtcttaggaatgtcttcttttgcgaccggaagcagataatcaggggtaacgccgattctctgtgtcacgtgctggtgaatgtgatgaagaagcttcgtcatgcggttctcatccaacggaacagatgtcacaaagaaaatcgccagctcatctgtcgtgctttgattcggccggacggcgcatgccgctgtataagacgtttcaatttccggcaattcctcaacggctgattcaatggcatggctgtaataattcacaccgttaataatgatggcatctttcgtgcgccccgttatcgtcaggcggccttcacgcagaaatccgagatctcccgtttcaaaccagccgtcttctgtaaagacactcttatttaagtccgggcgctcataatatccgctcgttacagtcagacccgacacttggaagcggccgatttctccttcttccaccacttgattgcggtcatccgtaattctcatattaaatcccgggatcggcagaccgatctcgacgaaacgatcgtcgtcactcgtgttttccagtgtaaactcatctgagaaaataacgcctgaagacgtttcggacattccccatgcgggtcggatggcattagccggcagaccgtacggctctaaaagctccataattctgcgtccgacttttgcaaccgcggcctccccgccgttcagcatgtaacgcatggaagataagtcccatttccgcgtttgaatctcttctgcaaaatcggcaagcagtccaaaggcaaaattgggagcccacgtaaccgaagcgcggtaatgatcaatcaggtcgagccattttaaagggtccatcaaaatggattcgctcggtatgttgatttcctcacatccgagataaacatcacgcagatgaagcattccgatgccgccgacatggtcaaaaggcatccagttaaacgtgacatcctcacttgtatagccctgcatctgaatatttcctttgaccatgcagacgatgttttcatggctgagcatcacggctttcggcgtgcccgtgcttcccgaggtcaaaagcagcatcgccaaatcttccggacggggatgatgacagtccgtatccatttcgtgcgcactgagatcttctgccgccaaagcgcaaaacccggaaagctcctgctcctccgcccattcagtcatctccggcagcacgtcgcggcttgtgatgacatacggccgattcaacagcatccaggcgtctttcagtttttgcgtcccgctgttcatttctgtataagccggagcggccgcaagcggaaccgggatcgctcctaaaaaaacacagccccaaaaagcaggaatcagctgggaattgtcacttagctgtaatatgacttcatcctgagccttcactcctgatcggcggagccctttcacaattgaaagagcgatctttttcaggccgctgtaagtctggtacactttggtgccgtcaggctgtatatatgtgatgcccttttgatctcccgctgccgcggcggttttgtgcaggacttcaggaatcgtcatcggctgatccgctgaaagccgcaatgattttccatagctgacagatggcttgagtaacccgcttgccttcatatcacttttcatagagctgcctccatttcatctgtatgtaagatgtatgtcttatactccgtacatcgtcgtgattcgttttttcacttcatcatcatgaaacgtctcatcgtgcatgattaactccttctcaatgacggccggaagctgctcgcgaaacggcgtcaccaagtgccttttcaatgtaattaaagagtttctcggtttttccgcaagctcacgggccaattcctgcgcatagtctaatacttcctgccgaggaagcaccggaaaaggcacccctcttttctccaggtcaccgccgcggtagtggccgccgtttaacagcatttcatggccgaggcttgccccaagcttctccggaacgataaaggtagcgcccattccaggggtgaaaccgtatttcataaagtttgcggtatacacgctttctttgcttaaaatgacaaaatcactgaaaagccccatgacaaacccgcctccgataccgtggccctgcatggcggaaatgacggggatatcacattccagcgccaaagagtacatgcggtcttccgtaaacttcgtgatgccctgctgaatcctgagcaggccttcctgtgtgcctccggaagcaaagtaatggccgtatcctgttaaaatcacagctttatagactgacgatttttttatacgggtgaatgcttccatcaatccatccgtcagttctttggagaaggcgtttttatgggctttatcctgcattgtcacttggataatatccggttcaatttcgagcagttcaactgcggcgttcggcatgatatcctcctaactgttctccgtttcccaaggaagccgccccgtttctgcataacggaagatggctgattggttatccggatctgaaaacatcgcttgattttcggctaaagcaatggatttcgaacgatgaacaaggtcgtttaaggaatccatgtattttttatagcggatgactgcttttttcgatagcgggcggaggcgcagcaaatgctttctcagctctgttgctgagtccgggacgcatacgtcacaaagtccccattcaagcgcctggcgtgccggcacgggctttgtcatgatcgtcatataatgcgccttttgaaatccgattctttgaattaaaaacggcagaacgcaggctggataaagtccgaataacagttcagataaactgaacgaagcactctcctctgcaatgacgatatcgcaggcggcggcaaaaccgacacctcccgcatttacttttccgcggacgcgggcgattgtgatgtacggcccggattttaatgccagccacaaacggtaaagcggctcctgcgattccgcatgctgcattccctgcctcattttccggtacatctcatcaaaatccgccccgaaacaaaatacctccggctgcccttcaagcactacggaggtcacggagtcttcacattcagaaagaacgtgcaggcattcctccactaaacactcattaatcgtattgttggcttcaggccgatcaaaggtgatgaagcagacattttgctgaaaacggacgtttatcgtttcataggtcacgggatccacctgtatttccgatgaaattccgtgatttcttccaaatacaaacgagggcttccggtatgatggtctaaaatgttcggaatcatattcacatccaatttgacattccgggttccaaacttcaccaaaccgctgcctttaaacagttcttcatattcttccatggacagcctgtacctgttgttcaggtgctcttctattttgaaagaatgctgccgcgtttgtccttcaggcgtcacaacgccgctgtaaaattctgaacagcacccggagccgtacgaaaaacagccgatccgcttagaagtgtcgaatgccccttggtcaatcgtgcttgcaagagccagtaaagaggctgcccccataatgtttccgactctttggcagtagcggagccccggctctactctggcttgaaaatcctgttcgatttcagcgtttttcgcttttgcaagcttgcgcatcatcgtccggtgggctccttttaccatgccgccaaacggtgtatggaaggctagatagtgaaacgtctctttatagtcagcgcccggcacacggtttttgtactcgcgaaatgtctgttcacagcaatcgaggtatgacatcaatgacaaatcggcatcaccggcttcactgtccgggatcggacggcatgtatccatcacctcatagccgtaatagccgttggcgcccgcatccgcctgaaatacaatcggattttcaccgatcaataaggcgacggcacccgctccggcgctcggttctgcgtaagaccaatcctcgcttaacgcatcaccgccttcggcaattaaaaaccgggaaatatccgtcgcgacgacaagcgccttcgctccgggggatgtctgcgacaaaataaaattaagggccatctgcaagcccgccgttcctgaataacaggcttgcttcagttcaaataaacggcagttccggttgaggcctaagtgatcatgaatatatgtactgagtgattttccgaagtcgatgccggactccgagcaggtaatcagcagctcgattctgtctttttcagcctctgtcaatcggtcgataatcggctttgccgcgttaacgccgaatgtaacggggtcttcgtacggaagcgccaccgctttttctttcatcagtaaattctcaaatctggcagggtctaagtttctgtactccgccagctgcatgacatcaaggtatgctgtcccgccaaacacatttatcgcttctattccggcagccgccatgaacttcgcctccaatatgaattttgagtttccgattgtttcaccgctttatcagacagcctgcaccttttcataaagcttttccgccaattcgccgatgtttgacactcccgtcagctcaacacgcgggatctgcagtgataattcttcaagcatcatcgtgataatttcggcgcggtctactgagtccgcccccagatcaactaaccggtcttcctgtgaaagctgttcgccttctaaatcaggcaaaacctcgtagattgtgttctgcagcaattcaaagattctttctttactcattgtcagttcctccctgtttcatcttttatgaatattccatgttttcaatctatcatttcgtcttgtcaacacgtttgcaaaaatgaacctaacttctgattcaaaagcgaggccgtctcttccataagccgcaggccgataccatcggcatggcggtttttccaggactccagctccgtacctttcacccattgattgaaggcgcctaatgccgggccgcaatgaatctggaagtctaccttggcatccgggtctcctttaatcgccgaagcagaactttgcctgaaataccatttgaatatgagcgccattttctgtttcggattccgttcggcttttgaaatgtcttcattcgaataatgagccttcactttgtcataaatactgcttacacttgccttaaaatacttctcttctatttgtctgagtgtcttttcatcaatttcttcaattgagcggtgacgctgatacagttcatgcagcttagaggcgcgggtcggaaagaacagccctttctttaatacctgcaccttgctgcctgattcaaacatatcgccggccggcgcgtaggccgtgtcctgtacattcatctgctgcaggaggtcctttacgaggccgctcgtcgctgcttcaacggtgcattggttaatagatccggtcacaataaaatcagcgccgagcataaatgcggccatggcagcctcgggcgttccgattccccctgcggctccgatgcggacggttttgccgtatcggtattttttcatcatgtcatctcgtaaacggatgatcgccggcatgaggctgtaagcaactccgccgtcagtgtggccgcctgaatcagcctctacgcagatgtcatgcgcaacgggtatttctctcatcagacttgcttcttcagcggtaattttgttttcggctgcaagtttctgcagaatgtgatcaggcgccgggctgagaaacgcttccgctacttccggacgggaaagcttggcgataatccgctgacgcgctattatttgtccgccggcaccgcgttttaaccccttagcgcgaaaccttactaaagcgggagtaaccgttaaaaacgctgatgcttccaagttctgaatcccatgcttcaataaaagatcaatcattttttcttctgaatctgtatgcttcatattatgtacaacatttatgccgaaggaaccgccgtcacgaagctcatgctgaattgacaaaatggcgtcctcaacgtgcgtgatgttcaaaccgcctgttccgaaaaagcccatcattcctttttcggccagtttgacgaccatttccttcgaagaaattccgcggtacatgccgccggccaagtaggcgtatttcaattgataatcgcgcttaaactcttcatttcctaaagacgccgccgtaattgagctttttccagcctcggccgggactttgatttcatctgttatcggctccgcttcagccgtaattctttgaatcagccccgtcagcacttttccgggaccgatttcctcaaagctcatgttctttcttcccattaagagacggatgctgtctgtccagttcaccgatcccgttatttgtccggtgagtgtctctttcagctctctctgctcatatggtcttgccgtcacatttgaaatgaccgggatggacagcggcttaaaatggaaagattcaataaagcgtgaaaactcttccttcgcttccagcatgtatctggaatgaaaggcgccgctgacatttaagcggtgaaccatttttacgccgtttacggcttcaaaaacagatgcggctttttcaatatcttctttatatccggaaatgacaatttgctgcggtgtgttcatgttggcgatatcaatcatatccaagtgattttctcttaaaacatccgtcacctgctcatgagtcaggccgatcaccgctgccatgccgcctccttttgcgcggctcatcagttcgcccctttttttgaccagctgtaagccttcttcaaaatcaaaggcgcccgaagcgtataacgcgttatattcgcccaaactgtgtccggcggtaaaatccggtttcaagccggtctcttctgtttttttcaaataactgagggcattgacgacatagagcgccggctgagtgaattgagtctgattgagacgttctccgtcccggcacagctcctgaatggaatatccgagaatgtgatcggcctttgcggttaattcaggatagcggccgaacaggttctcccccatccctactttttgcgagccttggcctggaaaaacaaagctgatcatcttacagtctccttccgggcggtgataaaatgctgtcttctatttgctgcaaatgtgtttgttctttatgaaacggcgtcataatggcacggatgcgttcagccgatcctgcaggaagaatctgtttggcaaatgcggccaatgttccggaaggcccggcatcaatatacaatcctttttggcggctgtctgcgaattgaagcgcttcgcggaatcgaatcggctttcttacgatatcccagaaaaagtccgcttgtatatcggtctcagcctctccggtagcactggagatgtacggtataaacggagtccggattgatttctgagctaaaaagcgcttgtacggctgttccgcctgatcaaccagcgctgagtgaaacccgtaagataccggcaatagctgatgaggaatctgcttttctctcagattgtccatgatctttttgatatgttcccgctctcccgagatgacaaagtgagaatgatagtttacagatgccaattcactatgttcgccgagcagcggatcatcttgatataaagccggatcacccagtatcgcaagcatactgccgttacggcaagtttccgtaacgattcgggcctgttccagcacgcaatctaaagcatcctcggcgctcagcacgcccgacacagcggccgctgcatactctccgaggcttgctccgatcacataatcgggacgtatgcctctttgctccaaagcatatgcaagtgcgtactcagccatgaaaatggcaggatggctgaaaagaaggcggtcaaatggatcagacagacgattgcctgtatgatacatctcttttaggacagagtaaccgaaacggctgactgcaaaatcgtccaagtcaagcattttctgccgaaaagcggcgttatgtgcaaacagctctttccccatttgatagtattgggaaccctgtccagaaaacatgaaaacaattggctggttcatttgttctcctttttgctgcttatttttttaaaatattgatttgtgagtgtttcgtgatgtcgtgtgcaggtgaagtggtcgtgatgttgtatggctggcactattgtgtgagataagaattttaacttgcgttccgctacatggcgggtgaagcttcagtttcttttttgatgcggtgaataagtcctgtcagcacatggcccgggccgacttcttcaaattccatccgccctttgtccagcagaaagcggatgctgtcgttccatcgcactgaatggtcgatctgatcggccagaacggagtggattccgtcttgctcataaggtctggcatgcacattagaaatgacaggaattgatatagcagaaaaatgaaatgactgtaaaaatttttcgaactcttgtttcgcttcactcatatatctcgagtgaaaagcgccgcttacgtttaacggatgaaacatcgtaacgtcttttaatccttcgaatacgcttttggctctttcaatgtcttctttgcgtccggatatgacaacttggtgaggagaattcatattggcaatatcaatcgtatgtaatccgtgcgtttgaagggcgtctgacacttgatctgcagttaaccccataacagcggccatttttccgtcagtggccatactcattaattcgcctcttttacggacaagctgcagaccggtaataaaatcaaaagcacctgctgcaaacagcgcattatattctcccaaactgtggccggccacataatccggctttatgtcattgtcttggatttttttcaaatagcttaacgcgtttacaacatataaagcaggctgggtgaactgcgtcttgtgaaggttggaatacggattctcaagacaaagccgtttcatagaatatccgagtgtttcatcagcctgctccgttaagtctttaaattcatcaaacaatgagctccccattccctgcttttgagaaccttgtccggggaataagtatgtgatcattttctcagccatcctttctcggattcagataagaagcatgttcaagttgatagtaacttcacaaaaataccatgtcaagttaatttatcctatgcgaactcctgaataatacctatttttccctgtcggaaggcggactcagggctttcggaacaggcgtaagcagaatgtcccatccggcctgcccggcgttctcttccgcaaactcccgttactcagccattcatcaccagaaatctagtaataacttccattccatttcagaagttccttgcctcaaaagaaaagctagttagatagaactaaattacgcattacttaaaatgaaacagccctttttgattttttctgttgcggaaattcacaaaatgttcttttttttcaatctgaaagtaaatattgtttttcaaaagactctccattttttgacccggcttctccccgaaggagtgccccggatacacacgcacatgcggcggaatggaggctttgatcctctgtatactgtgaaacatatcttcagctgagctgcccctgtcctcacatataccgcacccttctgtaaacacggtgtcaccggtaaaaagatgatcagatagcaaataacacattcccccggccgtatgtcccggggtcaatatacttttgatgataaaccctccggccgcaaaggtttggccgtcttcaagcgctattaagtttctgcaccggaattgatagaaatcgatttccgctgacgacatgtatatatcagaatgatagatttgctgaagcggctccgccaagtttacatggtcataatgcgaatgtgttaataaaatagctgataaatcaacatccaattcatgcagtttatcggttattttatcgatttcccaggacgggtccaccgctatcgcagattttttcgagcggtctgcgataatataacaatagttggaccacatctggtgataagttttaatttgatgcacttcatatgtatgatccattgtcaccattcccatttaaaagatccgggcagactgctgccgccgcccagccgactgtaaccactttaccagatgacaccacgtttttccatggattttccggtaaagttaaaaaaactttctgctcccgccaaaagcaccagtctggaccttttttacaaattgctatgctgatatataaggaaattagaatattaatttagatgaattctttagggaattttattcagaaaatgaaggatgaatatgggtttcagataaaaagaaaacaaattgagcttttgttttgaaaagcaattgccgaagcgaccgaaggggataatcagtttttagaaatgatccgcaatcaagattattattttaatccttttcttcaagataactaaaccacacgggctctcgaaatatatcagaataccttagttcttacaccgaattcaacgttatatggacattaacataattgaacttagaaaagtacggcgtaatttacactcttttcaaatcagccctagctgcaacaattcacgaaagtgccgcgcagctttttactgtgcaaacaaaactaacataaaatcattaagtgtaaaaagtaaatattaaacattagacaaacagactatgttatatgggtcggagtttaccgctcaaggtaaattgccctgggatgcaatacctgctaaagctgcctatgggtagaatcggcgttttgaaataattcttaatacgatcgacaattttactggtgcagtggaagatgcgtgctatgcgggtgctctaaaagaactggcaacccaacagccgcttggtggattactaaaactcttaggcttttcatttaaacgggactattgttggtgtttaacaaatttatcctgtgttaagttttaaagtgattattttctaacgtgttaagatcggaggtaactatggaagataaaagtaatgctgaaccgagcccaaaagctataagaattctaacttacatcattcctatagttttaatagggcttatccttgttcttaagaatattaataccgcagcagcagaaatttcattttatattgttgctatcggtgtggttctcttagtggttttcagtttgatcaaaaatagaaaataccgcaggaagaactaaatgtaaggggggctaattactagtcccccttgactaacttgcggatagtataacccgccaaattccaattttatttaaattcttcacaaataacatgagatttttcaggaaccgttttctccaattattttactattaatgcagtcaattgacgatatagacggttacaccaaacacaggatactacatcgccaaccccaaatactctccaaaaacaatttttatatgacagaaaagcagctggatgttaaacaaatcatcatgattgacggcataccaatgcaccaattatgccagaaattaaaaaactcaaaagttatctctgaaaggctgggtcattcaaactagtaaggctgcttgtgggcaaataacggtttagtctcacataaacgttgttattacatcacacgcttaaacatcttctccatctcatacgtgctgtggtggataatgatcggccggccgtgcgggcatgtgaacgggtctgtcgttcggcgcaggtcgtccaagagcgctttgatttcgtcgttgcgcaaatgccggttcgctttgattgagcctttgcagctcatcataatggccgcttcctcccgcagttttttaatatcgatctgtttggcgtcaagcacctgctgaatgatttcttcaatcagttcagcttcttccccttttggaaaccaggcaggatggcagcggacgatgtagctgttcgtgccgaatgcttctaaaaatactccgacgctttcaagctcatgctgatgctggtcaatgatcagcgcttcatttgccgcgtaatgaaaggtgagcggcacgatcatatcctgcacttcaggctcgacctgcccgactttctcccggaaatattcgtatttaatccgttcttgtgccgcatgctggtcaatgatatacaagccgttttcgttttgggctaaaatatatgtcccgtgcatttggccgatcggatacatcaccggaactctttcttcccgtatttcttcagagacagcttccggttccggaatatctgaaacaggcgctgccgtttcgggcataccgagctccggcggcactccgtgatccgcttcattcgggaggatttcttcttctattattagcggctcaggctcttttacgaccgaactcagcttcattggtgagtaagacggctccggcgttttttcaggaagtttccgctcaggcgcgctttcctcaaatgtcataaattgctgttcgtttttggccggtgccggcgctgattttttcgggagctgggcgctcggaataagccgctgcttttgaaacacttcctttatcccgtcacggatcagctcatgcagctccgtctctttgctgaggcggacttcaagcttcgacggatggacattgacatcaaccaaaatcgggtccatcgtaatttcgataaacgtaatcggatggcggccgatcggcagaagtgtgtgatagccctcatgcaccgcttttacaagcgggaaattcttaatgtatcttccgttaatgacagatgacatgtagtttctggatgcacgcgtgatttccggaagcgcaatgtagcccttgacttcaaaatcaagcgagctgacatggagcggtatcatttttttcgcaaccgccgtcccgtaaattgcggccagcacatggcgcacgtccccgttaccgtttgtctgcagcagatttttcccctgatgacggagacggatcgatacttccggatgcgcaagagcgatccggttgacaacatccgtaatattgccgagctccgtatgcacggttttcatatatttcaacctggcgggtgtattgaaaaacaggttggtaacgataatctccgttccttttctgctggaggatttctgttcagaaatgatattcccgccctgaagaatgagatgggttcccgctccctcgccgatgctcgttttgatttccagatgagaaacagacgcgatacttggcaaagcttctccgcggaaaccgagggttctcacccggaacaggtcgttttcatctttgattttactggtcgcgtggcggcggaaagcccgcttgcaatcatcggtttccatcccttcgccgttatcgagcacccgaatcgacgaaagccccgcttcctctatgtcgatttcaatgactttgctgtttgcgtcgatggcgttttccaccaattctttaacgactgaggcaggccgttcgaccacctcgccggccgctattttatttgaaagttcatctgacagctggatgacttttgccaagtccgtcacctctttctattttatttttttttgcagcttgtacatttcattcatcgcttcaagcggcgtcatatcgagaatattgattgacttaaaggcttcaagcacttgtttttctttattagaaacagccggtgccttctgttctttttcaccatcagcaaaaaaggacagctgtgccggttcttctttgacggcgggctttttctcaggtgccgccggaagctccggtttatctcccgtctgctcaagctgtttcaaaatctcctgcgcgcggatgatcagatcgtccgggagctcggcaagctgggcgacatgaatgccgtaacttttatctgcggctccttctttgatttgatggagaaacacgaccgttccgttatattcctctgcgcgcacatgaacgtttttcagctgaggaagcttatcttcaagcaccgtcagctcatgataatgcgtgctgaacagtgttttagcgccgatatgatcatggacatattcaataatcgcctgtgccagcgccattccgtcgtacgttgatgtcccgcggccgatttcatcaaacaggatcaggctgtcttttgtggcgttcacaatcgcgtttttcgcttccagcatttccaccataaaggtgctttgtccggaaatcaaatcatccgctgccccgattctcgtgaagatttgatcaaaaatcggcagaaccgcttcttttgcgggcacaaaacagccgatctgggccatgatcgatagaagtgcgatctgtctcatatacgtgcttttacctgacatattcggacccgtaatcaggagcatttcccgcgaatcgcccatcaggcagttgttcggcacgtattcttgactgtccatcaccttttcaacgacggggtgtctcccttcaatgacttttacttcattatcagaaaagacgggctttgtgtaatgcctgttttcactgatcgtcgcaaagcattgcagtgcgtccagttcactcatttgtttggcaagacgctgcagacgcggaataaattctttcaccttttcacgcagtccggcaaaaagctcatattccagctcgcagatgttgttttccgcttctaaaataagcgcttctttttccttcaattccggcgtaatgtaccgttcggcgtttgtgagggtctgcttccgctcataccgtccgtcctcaagaagatgaaggtttgcttttgtgacttcaatataatagccgaacactttattgaaaccgacctttaatgaacggatgcccgtataagcgcgttcctgctgctccagtctggcaatccagtctttaccgtttttgctggcgtcacggtactcatcgagcttctgatgatagccgtctttaattaaattgccttcttttaacgataacggcgggttttcatgaagggcttcttctaacaggtcaagcaaatctccgcacggatcaatcaagccggcgcgttcttttgcttttttatggttaagagaccctacaagctctttgatgctcggcacttgttttaaagattctttcagctggattaaatctcttgcgttgacgtttccgaatgcgacccggcccgccagacgttctaaatcgtatacttccttcaggcgctctcgcagatcttcacgctcaaacagatgattgatcagcgtctcgaccatttcctggcgttcttcgatttgggatgccctgatcagcgggcggtcaatccattgtttgagaagccggccgcccatcgctgttttcgtctcgtctaaaagccaaagcaatgacccttttttgcttttcgaacggatcgtttccgtcagctcaagattccgttttgaatacaggtcaattttcatcgcttcttccaattcatatacttgaaccggctgcaggtgatccaggctccgtttttgcgttttctgcaaatacgtatataaacgcataaacgtctctgtcagctcttcgcccggcaagtgctttgcgatttcaatgcgttctgttatttccccgtcttcgatagaaatcgtggcgccgcaccgttctttcagctgagcagctgtatgttcgttaaacttgcttgatacgacaatttcctttgcgccgactgagtaaatttctgacatgacatcttcaatccgctcaataaatacggccaggttttctccggtcgttaagtccgataaagcgaggccgtatccgtcacggaattcggaaacggaagcgataaagttgttttccgattcatgaatgccttttccatccatcacggttcccggtgtgatcagctggacgacttctcttttcacaacgcctttagccgccttcggat

SEQ ID NO: 63 - DNA, 16317 bp, Bacillus amyloliquefaciens
gccgggcttcctttgagcgtgtccggtacggccatcgacaggcagtgcggttccggattggacgccgtgagaatcgcgtgccactttgttaaagccggcgcggggagcacatacatcgcgggaggagcggagagcagcagccgttcccctttctcatcccgggcgcgcttttctcctgaacacatcggcgatcctgatatgggcatagcggccgagtatacggcacaggcttacggcgtaacgagaaagatgcaggacgaatatgcccttctcagctatgaacggagcgtcaaagcacacgaagacggcttgtaccgccgggaaattctcccctgccacggattcgccgctgacgaaaacatgctgaaaaagcggaacatggcgcctctcatcgcccgcgccaaacccgtctttcagtccggaggctctgtaaccgccgccaacagctgcggaatttctgacggggcggcggcagtttgtgtgatggaagaacaaaaagcgcgatctctcggtttaaagccgggattgcgttttatcggaagcgcggtaagcggcgtccatccgcattatccgtcagcagctccggtttatgccgtcaaaaagcttttgaaggaacgggacctgtcaccggatgatattgatatatacgaaatcaacgaggcgtttgccgtcaaaatatgcgttttttcacagcagcttcaagtgccgtattctaaaataaatgtccggggcggcgctctggccgtcgggcatccgtacggggcttccggggcggcgcttgtcacccggcttttttatgaagcaaaaagacgccctgatgcccgctatgcagcagcagcgatcggcagcggaggcggagtcggactggcgcttctctttgaagtgttaacgtaacggcagtataatagatgatatcgataaaaaatgatcggagtggagactttatgactgccgtttgtttagtaagacatggagagactgattggaatgcccaaaagaagcttcaaggcaaatcggatattccgttaaatgcgacgggagagcgtcaggcgaaagaaacaggagagtacttaaaggggtctgaatgggatgtcatcgtctcaagcccgatgaaacgggccagaaaaacagctgacattattaacgggtttttgaatcttcccattgtcgtcatggaagatttcagagaacggagctacggtgatgcggaaggaatgtctttaccggaacggtcgaagcgctacccggataaaaactacccgaacatggagaccgcagaagagctgacagacagaatgcttgccggtttagtgaaagttcaggagcggtttcctgagcaaaaagtactgatcgtcgctcacggcgcagccattcacgccctcttgtccgccatttctgacggtgataccgacatacaaaacgctaagcttgtcaatgcgtgcctgagcaatatcgaacgaattgaaaataagtggcgcgtcaaagattacaatgtaagcagccacctatcagaatcataacaaaaaggcccgaattcagttttgggcctttttagcgagcatttttttctgcagatcatgtaatatggcgtccgcaccgtcaatgctccggcgctccgtccataccgccctgtccgcgcggtaaacgcggccgttttttacggcagtcagctgtttccaaaggtgatttttttcgagttctttctcaccgtccagcagtacgatgtaatcaggatcgatatgcaaaagctgcccgggcgtcattttgatagagtctgatttcccgccggaatccgtctggaccgcatatgtaaaccctgcgagcgccaaaagccgggacgtaaaaaactgatcatcctttacggaaatgctgccatttgcagcgtcaattaataaaatcgtgccgccttctgcatccagctttcttttgatgtcattcagcttttcttcctgagccgacaattgtttctctatgatgccctctttaccgaccgccttttcaatggtaagggcagcatcaaccgcatcctgataatccgcagcttcatttttcaaagcgattgtcggagcgatctttgtcagctcatggtatatccccctgtgcaggcttgagtctgcaatgatgagatcgggttttaacgaagtgacctttttcaaatcgggatgtgacgggggcccgacggacggactgccgtcgtttcgctctttccggttatccgccgcggccgccggctttatgccgaggtcatggagggtgtcaataaagccctcattcaatacggcgatgcgctgcgggtgcgcagccacatgcgccgtccccagatcgtgcctgacggcggtttcatgttcctgttctgagcatgccgttatgaagagaacggataagatcatcagcatactgaaaattggtttcatctgttccccctctttcgtttttccgcaattatatcattgacaatataagtatcaatgatattcattatcattatttttataaaatggtttcacagcttttctccgtcaagaaagccaaagactgattcatgccggccgctttatttcattccgctttcgtttccatcagacttctgcattcaacaaaaggtgacatttatcctgtttttgcctcagcttccaaaaatggaatcaaaccgttcgacccagtaaacaagagagcgtttgcggctgtgtacaaatactcatgtccttccatcggttttttccattaaaatttaaatatttcgggttcctattaaacgaaagagagatgatatacctaaatagaaataaaacaaactgaaaaaaattgggtctactaaaatattattccatactatacaattaatccacagaataatctgtctattggttattctgcaaatgaaaaaaggagtggataaagagtgagaggcaaaaaggtatggatcagtttgctgtttgctttagcgttaatctttacgatggcgttcggcagcacgacttctgcccaggctgcagggaaatcaaacggggaaaagaaatatattgtcggatttaagcagacaatgagcacgatgagcgccgccaagaaaaaagatgtcatttctgaaaaaggcgggaaagtgcaaaagcaattcaaatatgtagacgcagcttcagctacattaaatgaaaaagctgtaaaagagctgaaaaaagaccctagcgtcgcttacgttgaagaagatcacgttgcacaagcgtacgcgcagtccgtgccttacggcgtatcacagattaaagcccctgctctgcactctcaaggcttcaccggatcaaatgttaaagtagcggttatcgacagcggtatcgattcttctcatcctgatttaaaggtagcaggcggagccagcatggttccttctgaaacaaatcctttccaagacagaaactctcacggaactcacgttgccggtacagttgcagctcttaataactcagtcggtgtattaggcgttgcgccaagcgcatctctttacgcggtaaaagttctcggcgctgacggttccggccagtacagctggatcattaacggaattgagtgggcgatcgcaaacaatatggacgttattaacatgagcctcggcggaccttctggttctgcagcgttaaaagcggcagttgacaaagccgttgcttccggcgtcgtagtggttgcggcagccggtaacgaaggcacttccggcggctctagcacagtgggctaccctggtaaatacccttctgtcattgcggtaggcgctgttaacagcagcaaccaaagagcatctttctcaagcgtaggttctgagcttgatgtcatggcaccaggcgtttctatccaaagtacgcttcctggaaacaaatacggcgcgtacaatggtacgtcaatggcatctccgcacgttgccggagcggctgctttgattctttctaagcacccgaactggacaaacactcaagtccgcagcagtttagaaaacaccactacaaaacttggtgatgctttctactacggaaaagggctgatcaacgtacaggcggcagctcagtaaaacataaaaaaaccggcgtcggccatggccccgccggtttttttattatttttcttcctccgcatgttcaatccgctccatgatcgatgggtggctccctctgaaaattttgacgagaaacggcgggttgacccggctcagtcccgtatcggccaagtcctgaaacgtctcaatcgccgcttcccggtttccggtcagctcaatgccgtagcggtcggcggcgttttcctgatacctggagacggcattcgtaatttgatcagaagcaaaactgagaacggatatgagcagcaataacagcgggagggcggccagatcttcaggcccctttatatgaagcattcggccgaagaatttggacagccgcttataaagcttgtcaatgatatagaacccggctaatgacagcagcagatacccggccagtccgatgtacacgtgcttcatcacatagtgccccatctcatgccccataatgaacaaaatttcccgatccttcagtttgttaagcgtcgtatcccacaaaacgattcgcttattcgaaccgattcccgtcacatacgcattcagcgcattcgttttctccgacatattgacttcataaacatggctggccggaatgtcggccttgtcggcaagcgacaaaattttgctttccagctccttgtctttcagcggatagaaatcattgtataaaggatcaatcacgaccggctgcaggaaaaacaaaaacagggtaaacggcacagtaagacaccaagcgtaaaaccaccatttttttgtatgctttgtgatcagccagtaaaacacaagcacacacacggcaaacagcggaaaactgatccagaaatcaacgacatggtctcttatccagcttgctgttgtctgcgtcgaaatatgatacgcaagcgaaacccgatatccgatccactcaagcggaagcgaagccgccgtaacgatgagtgaaatcacaaatacgaagcttacaatttgcagcacccgaaagcgcaccgctgcttcgagccaatgctttatttttttggcaagccccgtaatgagcagcagaaaaaataaaaaccaatctaacggcgctccgatgaaaaataaaaaatcttttacatttgaaaagttttcagcggctgccaggcggcccgggtccataaacgaggacggatcggctttcgttccctttacggcctccgggacggcggagtctcctgtcataaagaaataccaatagaaaaaaaggccgtacagcacataggcaagccccgctgccgctatccatttgcgcatggaagtctccctccttagccttatgacttactcctattgtaagcataaatgcaaataaatagaaccaagcctccgaaacggatgttaatcttttcacaacagaaaagaatggaacaacaggaagcgggaaagactaaaagacggagtgatgaatatgaaaaaaataatcgcgtttattgtagtaatcgcccttttggttattgctttcttctatgtatacagccggaccggcgatgtgtttccatcaagcaacgcagatctgattattctgtctgagcacggaaaaaaagaaatcaaaattaaagacaggcagaatgtaaaagatatgctcgatatcttgaaccaaggaaaacaagtcaaactgaccaaaagcgtatctcccgattacgacggaacggtcaaataccatgaagaccgttttgattcattcagcatgtggctcgaaagcggcaattatatgatgtacaagtataaaaacacgtattacaaactgacccggcatgatacgaagcttgtgcaaagcatcattaaggaagaatcgcagagctgaccggatcagcatgtaaaagcgaagccccccggcttcgcttttcgtccgtcatttcggaagcatgtcccggaccgcccgtctcagcagcttcccggtcgcgttcttcggaatctcatcaagaaaaaccacttccgccggccgtttatattttgccaaatgtgtttcacagtaatcaaaaaccgcctgctctgtcagctcaccgtccccaggcactatataagcatgcaccgcttcccccgttttggcgtcaggaacgccgatgaccacggcttctttaatgccctcatggctgtagagcacttcttctacttcgcgcggatagacgttgtatccgccgacgagaatcatatctttttttctgtcgacgatataaaaataaccgtcttcatcgcgcttcgccaaatcacccgtgtacagccagccgtctttcagcgcgtgctccgtctcctcgggcatcttgtaatagcctttcattacattcggccctttcacgatcaattctcccacttgatggtcgggcaattcgcgtccgagtgtatcgacgactttattttcgacatgtaaaatattcgtcccgatcgagccgggctttctcccccggtcaaacggattaaaacaagtaaccggcgacgcttcagaaagtccgtacccctccagaatggtgacgtcaaaggtttgttcaaacgtctgcaacagagcgaccggcatggaggccccgcctgaaatgcacagtctgacggacgcaaaatcctccgccttgccgtgctcgtattgatacagatagttatacatcgtcggtacgccggcaaaaatggttgcctgacggcttttaatcagtttaaacacagaagccgggctgaattgcgactcgattaagacacacgctccgctcatcagaggcgcattcatacaaacggttaaacaaaaaacgtgaaacatcggcaatgccgccacaattttgtctttctcattcattcctaagtatccggcgacatcatttgcattggagaaaagattctgatgggtgagcatggcgcctttcggttttccggtcgtccctgaggtgtataaaatgacggcagtatcatctttggacaatgtcggataagttctgctgcgctccgccgggcggagcatttttgcaaacgttgtcatttttaagcgcaattgagggtcttctgtcgatggagcgttctctgctgtctggctgataatgatatgctccagcagcggcagcgagccgtgcaggctttcaaatacgggaattaaaaggtcgatgccggcgatcgctttgacatcgccgtttttcaacatgtatgcgatttctgaaggtgtatatgccggattaacaggtatgacgacaattcccgcttttaacgcgccgaaaaacgcaataacaaaatcaggcgtatttccgagcagcagcgcgagatgatccccttttttcagtcccctgtcctccaagccgtttgcaaatgctttgattttacctgccagctcctcatacgtcatgtactgatcttgaaacagacaagctggtttttccggtttctgcgatgccgtttcttccaatttggaaaccagattcattttcccacccctttaaaaaagtaatgaatgaatagtcattcatttatccggaataaacgttcacttttattatagaaaaatatagaaaaacactcaagggcaaaaagccccgagtgccgtaaaaccggaaactataattgtttcagcgcttcactgaccggcgtgctgcccgctgtcagatcgaacgctttttcatacgtattcggttcatcaagggatgcgataacggtcttggcgacatcgtctcttgaaatggagcctctttctaaatcggccgcggctttgatatttcccgtgccgggatcatttaataacccgcccggccggataatcgtatacgtcagaccgctcgcttcaagaattttatccgcataatgctttgcggcataatacggcttcagcgcttcattccaattgccgcggttatgagcctgcagggcgcttaccataatgaaccgcttgatgccggctttctttgccgcttctatcgctttcgccgctccgtcaagatcaatcaaaagcgtcttatcgtatccggtgcttccccctgatccggcggtaaacacaatcgcgtcacagccttcagcggctttcgcgatgtcttctgtgcttccttccaaatctgcaagaacggcttctgttcccgcggcttgaagcgcttctttctgctcttgtttccggaccatcgcccgcagcgtatgcgtgccgtctttttgaaaaagcccggtcagccgctgtccgatctgtccgtttgctccgatgagaaatactttcatcatgatccctccccattcattatggttctatcatttcacaaaaacgggcgctgattcaaatcatgcgttcggcaaatgttctaataaatcagctcgaggaaatcttccagctctattttgccgaaatactgtttcagatcgattccggccagcgcctccttgatagcggttctgtcatactgttttccggtcagcgcctgttcgacttcactcacatctttcgcaccgaagaaatcaccgaaaattttgcagtcctgaatgattccttttttcacttcaagacgcagatcaatcgatccgaccggataacgtttcgaatgctgaagattaaatgcgggcgacctgccgaaattccagtcccagttttgatagcgctcttcggaaatcttccggatcgctttccagtcttcatcggtcagtttatattccggcacttcggaaagatcatttgtattaaaaatatggtgaagcagatgctttttgaattcgtccgccgtcattttgtcatcaagaaactcgctgatgttggcgacacggcttctgattgacttaatgccttttgattcgattttgtcttttttcactttcaaggctgacacaacatgatcaatggcggaatccagcattaatgttccgtggctgaaaatacgccctttcgtcgaaaattgagcgttgccggaaatttttctgccgtccgcgacgatgtcgtttcggccgcttaattcagcttctacaccgagctggcgcagcgcctgaataacgggttcggtgaattttttaaaattgtgaaagctgtcgccgtcatccttggtgataaaactgaaattcagattcccgaggtcatggtaaaccgcaccgcctcctgacagcctgcggacgacgataattccgttatcttctacgtatttcgtattgatttcttctattgtgttttggttcttcccgatgataatcgacggctgattgacataaaacagcaggtaagtctgttcagggtcgagatgcttcacgcaatattcctcgatcgcgaggttgatcctcggatcggttatgttttggttgtcgataaataacatggtgctcctcctttatttctcccacttcaatccggaagcggcgattgtcacttcgcccccgaacacggattccgcttcttctttcagcttccggtgctcgccgaaatgaggcagatgcgtgagaatcagctcccccgctccggcctccttcgcgatacgtccggcttccaaactgttcatatggccggctgacgtgccgtcctggtctgcgtaaaaattgcactcgcagatcagcagatcggcattttccgcaaacgggataaacgcgtcctggtagcttgaatcagccgtatacacaacagaagctgaaccgtcagtaatccgcatcgcataacaagtgaccggatgcaccgttttcagaaaggtaatggtgaacggccctgcagaaagcgggcggtccggctgataggccactccctttgtatgcgttttatatgtaagacgctcaaactgttctatatcagcatcatgcccgtaaatcggcagtgcatgcgtcccttttccgagaaaggagccgacctgtttggcaaattgaagcggcccgatatcagcgatatgatcatggtgataatgggacaaaatgacggcatcaagctcttctgccggaacataggcaaatagctttgataatacggcgcttccgcaatcgacgagcagagaatagccgccggactgaaacagatagcctgaagttgcttcgtttgcggccggatatccgccgcagcatccaatgactgtaactttcatataatcctccgaatgtttatgataaaaagatcctttcctccaatatacctatttttcgtacaaattgcatgttttaaacattgtgccaaaacagccgttgattttccaaaactgttataatacaatgtagagacaaaataatgaaagagggatgggtatgttggaaaagatgtcggattttttcagaaatttacccggtaagaaatgcgaagaatgcggaaatgagattgttgagcagtatgagtgtcacattaatctgtgcaatgactgcttgaaaattaaggatatgtgacaatagggcgccgcacaattctaagttgtgcggcgcccgttttttcggccgtcatcatactttctgaatagggcgttattcaccattattagcaattatctgtacgttttaaaagattcagtattttcaatctatatttttctatagacggattgttttcttttctattataatttgttctaatagctatctttttagatacttattgcacttttttcttcgggaggtaatctatgaaaaaattacgctttggactagcgacgcaaatcttcgtcggactcatactaggggttgtagtcggtgtcatctggtacggcaatcccgccattccaacatatttacagcctatcggcgatttgtttttacgcttaatcaaaatgatagtgattccaattgtcgtctccagcttaatcatcggcgttgccggtgcgggaagcggaaaacaagtcggaaaattaggcttcaaaacgattttgtattttgagatcattaccacttttgccattattctcgggctggctttggcgaatctgtttcatccgggaacaggcgttaatatacatgaagctcaaaagacagatatcagtcaatatgttgaaacagaaaaagaacaaaataacaaatctatcgcagacacattcctgcatatcgtaccgacaaacttcttccaatcattagccgaaggagatctgcttgccatcatctgctttaccgtgctgtttgcactcggcatctcggcaatcggtgaaaaaggaaagcctgtcttggccttctttgaaggtgtttctcatgcgatgttccatgttgtgaacctcgtcatgaaagttgcgccgtttggtgtttttgcattgattggtgttaccgtttccaaatttgggctcagttccctgctttcactcggtaaactggtcggtttagtatatgtagctttggctttctttctcattgttgtattcggaatcgtcggaaagcttgccggagtaaacattttcaaattcctcgcctatatgaaggatgaaattttattagcgttcagtacgtcaagctccgaaaccgtactcccccgcgttatggaaaaaatggagaaaatcggctgtccgaaaggtattgtttcctttgttgtgccgatcggatatacctttaacttagacggatctgtgctgtaccaatcaatcgccgctttattcctcgctcaggtataccacattgacttgtccatttggcagcagattacccttgtgcttgtcttgatggtcacttccaaaggaatggctgccgtgcccgggacttctttcgtcgtcctgcttgcgacattaggcgcattcaacattcctgcagaaggccttgcattcatcgccggtgttgaccggattatggacatggcccgtacggtcgtcaatctgaccggaaacgcgctggcatccgttgtgatgtcaaaatgggaaggccagtatgatcccgttaaaggcgcgaaggtcatgagcctcgccaaaacagaacaaaacacaaccatctcaggttaaaatgaaaaccctgcacggaatgatttccgcgcagggttttttatgccatcggcgatagaacgtaccggtgcaaaagcttcgccgtattaagaagcgataactcatgcgtgcgttcaaaagcgtgtgaagcgtcaattcccgggccgatcagcccgtgaacgatgtcatggcccgaacggatggctgctgaggcatcagaaccgtaatacggataaatatcaagctggtaatcaatgccatagcgctccgcaagcccggccagatgttttctgagctgataatggtacgggccgctcgcatccttcacgcaaatggagacggtatattcatccgtagactggccgtcgccgatcgctcccatatcaacagccaagtattcgacggtctcaggaggaatgttggaattgccgccgtagccgatttcttcattattagaaatcagaaaatgcgtcgtatacggaagttcgattttctcttccgtgatgcggcggattaaattcaagagcagagccacgctcgctttgtcatcaagatgcctagacttaataaagccgctcggcgtaatctgcacacgcgggtcaaatgagatgaaatcgccgaccctgatgccgagatcagacgtctcttccttcgtccggacaggctcatcaaggcggacttccatattctcctgattccgctctgccttgccggcgtccttgtagacgtgcactgaagtctgatgcattaagatggtgcctgtataggttttgccggaagaagtttggatctcgcaatattccccttcaatcgagttatatcggaagccgccgatcaagtcaatcttcagccggccgtccgcctttatctcctttaccatcgcgccgagcgtatcgacatgcgccgtcagcaatctgtgtttcttgtcatcacggccgggaattgtgacaaaaagaccgcctttgcggcttctgtaagaggagacgccccattcttttaaaagactttctgtataggcgataacctcgtatgtattacccgtcggactcggaatcgacaccaattctttaatcagttccatcgtatgtttcatattttccacaggtcattcctcctatcaattttattcttcttaaaatatactcttttgatccacaacccgtccaatcttttccttctcttttttcatagaatgaagggagcatgagcataggagggaaatgtatgatcagccgtaaaccgcacaagcggaaaagatttcataatgattggtttgaggattggtttgaggatgattggtctggtgcagccttctggggctgtaaaaaagaaaaagatcactgtaaaaagaaaaaagaagacccttgtaaaaagaagaaagacaaaaagaagaaagacaaaaagaagcatcatcattcatgctgccgctgccgtcattggtaatcgttcacacaagcccgttttacaaatagattctcatgctccccaaacagcggatgctgcttgggtttttttattaaaattagtaccaagtaataatatcaggtgttataatctgatataaaggagtgattttttcatgtcaaaatctaaaattacagcaatcggtacatatgctccggcacgccgattaacaaacgcggatttggagcgcatcgtcgatacatctgatgaatggatcgtccagcgcaccggtatgaaggaaagacgcattgccggcgaacatgaattcacatcggatttgtgtgtggaagcggtgaaaaaccttgcagaacgatacagcggaactcttgatgatgtcgatatgatccttgtcgccacaacgacggcggactatgcgtttccaagcaccgcggcacgcgtgcaggcttacttcggctggccgcacacaggggcgcttgatattaacgccacatgcgccggactcacttacggccttcagctcgcagacgcattaattactgccggttcccatcaaaaagtgattgtcattgccggtgaaacattatcaaaggtaacagattatactgaccggacgacctgcgttcttttcggagacgctgcaggcgccctattggtggaacgcgatgaatcagcgccgggctttttggcagccgtgcaaggaacagcgggaggaagtgcggacgtgctgtatcgcacgggactgagcgcagaattaaacggcgagccgcttaaaggcggaggaaacatggtgcaaaacgggcgcgaagtatataaatgggcggccagaaccgtgcctgaggaatgcaatgcccttttagaaaaagccggcttttcaaaagacgatctggattggttcgttcctcacagcgccaacatgcggatgatcgaatccatctgcgaaaaactgcccttcccgcttgaacggacattgacaagcgttgaatattacggcaacacctcatcggtttctattattctcgctttggatgaagctgtgaaagcaaaaaaactgtcggaaggccagacgctggtattattcgggttcggcggcggattgacgtataccggactgttggtgagatggggattttaatggtacgacgatcgaaatctaaaaaaagaggccctgagcatctgctcagagcctctttttcttatgctgttatttcttcttccgttttgtgttcttttttgctttgcaccgtaaaatacacgatggtcagcgcgatcatgacaacggcgatgcccaacagaatggatgcctgctgccacatatagccgtaatcgccatttgaaatgacggcgcggaacccgttgatgctgtaagtcatcggcagtgccccgtgaatcacttgatagaatcccggcaggagttcaagcgggaaggttcctccgcttgccccgagctggagcaccagaatgatgacagcgataaagcgtcccggatttcccatcgttgtcgccaataattgaatcatggacaggaacgcgatgctggtaatcatcgtaaagagatagaatctccaagtgctctccacatcaagcccgattccttttaacagaaccgtggcgacaataacggattgaatcagtccgacgagcagaatgacgctgaatttgctgaggaaccattcaaaaccgtttctcggacgccctgaagcttcactcagagggaatacgaccgtcagcatcaatccgccgacatacaagcccatagagagaatataaggcgtcagtccggtaccgtagttaggcacggaatgaatcgcgttatcgtccgtttttaccggatcggcaaacatgctgtacgttttgtcatctgtcttaatatccccggtttgatcagccgcatctttcagctggctggacaattgtccggtgccgtctaaaagcttgcttaaaccggtgccgagagacgcttgaccctgctcaattttggacgagccatcatggattttgttttgcgcgtccagcagtttcgttaagccgccagacacctggccgctccctgacactaacgcttctgatcctgatttgagctgtccgaacttgctgttgtattcgccgataccggccgtcaatttgttttggctttcaaagacggtctgcgctccgctgtacaatttatcagttccggccgtcagctggttaatcgcgtcttgtaccgccgccgcgccgttatacagtttcgatgtggactgaggcagtgctttcagctgatcagccttcgcttttacatctgccagcgcgctttttatgactgacatatccggaagctggatatctccgccggacggaagctggctgacgatattgtctaaatccggaaggtcggccttcggaagcttctcattcagaagctgaacaagtttcgctttttgctcatccgttaagaaatcactgtccttaatcacctttttgaccgcgtcatcccgggcatccaggctgtttttcagatcagaaagctttttcttaaactgctgcaattccttttcagtctgctcaagctcgccaaccgctttttcaatatctgagaggttgactgaattgatcgcatcttcaaatgccgccgctttttgcgacacttcctgcgccttgctgtttaacgcgcttaatccattcgttaaatccggaagcttttgctggagctgcttttgtgcgtcaaggctcgttttcagcccgctggccacttggcctcctcctgaagcaatctgtcctgatttatcttgaatttcggcgcttgcgctctgaagttttgcgatagagctgtcaagcgtttgaattccgcttgtcactttcgccgctccgtctgcaagctgctgcgttttatcgccgatggtggcggtgctttcagtaagcttcgctaaattttccttcagcttggcgctgccgtctttcgcgtttttcgtgccgtcgtctattttcttggcgccgctgctggctttgccgagtcctttggcaatatctttaaaa

SEQ ID NO: 64 - DNA, 24924 bp, Bacillus amyloliquefaciens
tttagcaggctgtccgacgacaaagtgtgcgtctattgtcagtccatgtaacgactaaacatatccgaaaaagaatatgtatatgcgtacatattctttttcttttttgtcaaagacaatcaagaatatataaggaagtgataaatgtgaacaaaacacagaattcggataactatgtttatgaaaactctatgttaaatctttttaaagaagaggattatttcgaaggttttgcgcagtattatataagtatttttaaagctcagattgttaaagaaatagatagaataccatccgaaagtctgctggataagggatgtcttgttgaatcgatattaattaattataagaaaaaaatataccatttggcggggaaaacacttatccatgagtttcatcaaacttttgacgagtttgatcaaaaaaatgaatctaaaaattatgatatattctcagaaaggctgaaaaactccgcatttgttgaagaaatactcaataattatcctgtattgcaagatttaatctccagatccacctctgattttatacgcttcactatatctattattaaacattgggttaatgactataaaaaaatccaacaaaaattcaatctttcgttcggaaaaatgagaaagattaatatgaatgcaggggatgttcataatggcggtaaaagtgttgttattattgaatttgaaaataacaaactcgtttataaaccccgttcacttgaaattgatgttttttatgaaaaggtcattgattatgtcaatcagtattatcaaactaatttaaaaacacctttatccttgaatcaaggtgagtacgggtggcaagagtatgtacagtctgaaccgtgcgataatattgaacaggtaagaaattattattaccaatttggaatgcatttaggatttatttatgcttttcaagggtcagattttcattttgaaaatatcatagcatgtcgtgataaaccggtgttggttgatcttgagactctgtttcaaagcagcctctttttttctgaggagaacaaggaaaatgttaatttaatggcatcagcacaggtaaataaaacaatattaaaatctgcactttttaactatatgagttttccggaagataacgggctgactaatataggaggcttgataaacacagaaaatcaaaaaggtgaaaaagaagaagtgcttcatataaaaacagataaaatttctatgagaaagaaacaatatctcttcaaaaggggaaggaatcttcctgtttacaaaaataaagtagcagaatgctttgaatttgaaagagaatttattgaaggtttcaaaagaatatactttattttgaaagaagatttatatatacggaaccttataagcgatttaaattatgctcctattagaattattgtcagacctacatatgtttacgcttcatttcttgaaaccctcctccatcctatgtatttaaaagattatggagaaaggataagggttttatcttttattaaggatgcttatacaaaatataaagtatttgattccatcagtccatttgagatcaaggatatgatgatcggtgatataccctattttaatgctcctattagtgaaaaaagggtttattcaaattcaatacatgtggtggatacagggattatgaaacaaagcgctaaacaagaagttttaactcgtttagcgaatatgtcggaagaagacatgcatcagcaagtgagcttgataaatatggccttaagctccacggcggctaatttggatattatttacaaaaatcaaattgatgattttgtacctggatatttaaaaaatgacatacaaatcaaagagctgattcaaatagaaacagattgtatattaaaacaagcaatcgaatcggagaaatatcttcaatgggtatcaatagtctcggctcccaatggcaccttatccgtaggaccgctgagttttgggctgtacgatgggttagctggagtggggctttatttttcagcttatgattttatttataatgatgaaaaagtcaaatcggttcttcgtaaaatagtgaattcaattaatcaaatatatgagcatagtatttataaaacaaatttctctgctttttacgggtcaagttcttatatctattttgttaataaaatgagaggtaccggactttattcggaaaatgaagtgaatagtatgtgtaaagcatacttagagaaacttcgtcaggaaaccgctcaaataacacatactgattttataggcggactcgcaggtatattaaaggttgtgattcagcttggcaggtattatcggactgaattaatggaagatacggcaagagcagtttgtaaagaaatatgcaaaagagcgattcaaaatagaaatgaagcatattggaaatccgacgcggatgagaatattgttttagcagggttttctcacggtattactgggatttgttatgcactatctgaatattatgcgcatattgaggcatctggagaagtacttagactgattgaatcagctctcaaatacgaagataaattttttgatattaaaataaataaatggagagataacagaaaaaatgagtcggattattcttccgcaatgtggtgtcatgggtcttgcggtattcttcttggaagaagcaggatatacgagaatgtagacgggcgtattcacgttgggtatattaatgagtctttagatgacacattgctgaatggaaattcccaccgtcagggctactcattatgccatggaacgatggggaatatagatgtacttcacgctattaaggaattatctctctttaaaaatcgcaagcaagagattgagaatacaattaatatatgggttaaccattttgaagagaatctgttaaaaaatggctggcaaaatggaataagaaatgatcattcgggacttggtatgatgttagggaaaaccggacaattatatgcactcttaaggttagttaataaagaaattcccaccccattggctttggattgaggtggattttctaaataaaaaagcgaccctgtaaaggacgcttttttatattaattttattccgctgattaaaataatcgccgccatcacaaactgcagcgggcgcggtgagaatttcggcgaaaagaagctgccgagaagcacacccggcacagagccgatcaacagattcaatacaagcaggtaatcgacgcttccgaagcttgcgtttaacagaccggcagccgttacgagcaaaaaggcatgtgcgatatccgttcccaccacttctgccgttttcattctgaataggtataacatggcgatcgcaaataatgagccggacccaatagatgtcaggccgacgatgaagccgaaaatgacgccgatcagtatcatgagtgtccgcttttcttcaagcgttttttgctgccagcggttcggccgcagttttttatcgaaaaaaaggcgggcgataatggaaatggcgacaagggtcagtacgtagccgagcgcctgtttgataatctgctcctgatgctggtgaaaagcgggaaacaagtgaagaacaccgatggcggctgttgcgctgggaatgctcccgagcgccaaatagccgacaagtttaaattgaacggtgcgctgcttccaatgagaaacgacaccgaacagtttggtgatggagttatataaaaggtcagtgccgacggcgattgaggggttgatccccaaaacgatcagtaaaggagtcaaaagcgccgctcctcccacacccgtcaatccgaccagcgttccgacaaagaaacccataaacacaatgcttacagtcatctgtgtgcctcctgaataatcctactatttttatcagattatatatgattaagaggcggtaatcaattaaattttcggaaaattttatacagaacaaaaaaatccgccagcctgctgttatgtcgcagaccggcggatggccggattatgatttttgctgataaaacggaagttccgtgtggcccatttctctgacatacacgaaaagattgcctttatgatgaatttcatgctccatggcaagctgaaggagagccgcgccggttacttttctgccgaaagaggcggtcaggtcaatttcgcggttcagctgctcttcagtcagctgtgacaggatgtctgtcgttttttcagtacatgcttccgccagtttgacgaggtctgtttccgcttcttctttcggtttgttctggatggctgatccgtttccgtcgttaatgacgtttgcaaacataagaaaagaataaacgatgtgttttacaagttcctgagcggacattgatgtctctgccggtttgtagtcgtaatgctcgcggctgattttttccgccagttcaatcgtcacgtttcgatgtgacagaaagtggctgaccaattgattttgtgctgtcatgtgaaaacccccatttaatacagaataaaagctgcaaggatatgctatatcaacggcacggaagaaacaagcaataagcttgtgacggagataaatcgttgcggatatccgaaattcgacaattgcggtctttttgcgttcttctttttctagcaaatatgataaaatatgacatatctcggtcattccaaaaggggggatttattgaggatgaagcagactattccgtcctcttttgtcgggctcaaaattaatgaatggtatacccatatccggcagtttcacgtccttgaggcggagcgcgtcaaacgtgaagtagagagagagatcgaggatatggaagaagatcaggatctgctgctgtattattcattaatggaattcagacaccgtgtcatgctggattacatcaagcccttaaaggaggacccttctcagcctgagttttcagaattattggaagacattgaaggcaaccagtataaactgacaggactgcttgattactactttaatttttttcgaggaatgtacgaatttaaacagaaaatgttcctaaacgccatgatgtattacaaacgggctgaaaaaaaccttgcactcgtttctgatgacatcgagaaagctgagtttgcttttaaaatggccgagatattttacaacctgaaacaaacctacgtctccatgagttatgccgttcaagcccttgaaacgtaccaatcgtatgagacgtacaacgtccgcagaatccaatgtgaattcgttattgcagggaattatgatgacatgcagtatccagaaagagcattgccccacttagaacttgctttagatcttgcaaaacaagaaggcaatccccgtcttattagttcagccttatataatctcggaaactgttacgaaaaaatgggagacctctctaaagcagccgaatattttgagacatccgtttccatttgcaggtcagaaaagttcgataatcttccgcattctatttactcattaacacaggttctttataaacagaacactacagcagaagcagagaagcaataccgcctcgggctcagtatcgcccgcgaatacaatgatgaattgtttgtgaatctgttccaatttttacatgcgttatacggcaaggaaatggataacgcatccgtcaggcacacgtttgattttctggaagaacacatgctgtatccgtatgtggaagaattggcgcatgacgctgccaaattttacatgaaacacggacagcctgaaaaagcgctcacgttttatgaaaaaatggtgcacgcccaaaaacaaatccagagaggagattgtctatatgaaatctaaactgttgtcaggattgctgcttgttgctgtcgggttcagctttacacaggtgatcggccatgaaagccatttggaaaaccaagcggacggcacattccatattgccgcgcgcaaccaaacataacataaagacccttctttggaagggtcttattttttgcatgcgtatccattccatttttatccgaatgcagagtctatatgctcaagttatctgtcctacgaatgccacctattgatgaaaaaggcataaggagagatgaagagtggggattgaagtgaaaaaacggctcgtatcggctgataaatatgcgttaaaatgtccgaatccgatgacaccggagtatattaccattcataacacggcaaacgacgcatccgccgctaatgaaatcagctatatgacggggaacagcgaatcaacgagctatcattttgcggttgatgacaaagaagtgatccagggaattccgttggaccggaatgcctggcattcgggagacggcacgaacggtaccggaaaccgtaagtcgattgctatagaaatctgttacagtaagtcaggcggcgaacggtacagagccgcagaagaactggcgattgcgtttgcggcgcagcttttgaaagaacggggctgggggattgacagaatcagaaagcatcaggactggaacggaaagtactgcccgcaccgcattttgtctgaaggccgctgggatgaagtgaaggcgaagattgaaaagaaattaagcgggagtatgccggcgaaaaaagcctctatttcttattccgcgtctgaataccatgtgaaaaaaggcgacaccttatcggaaatcgccgcatcgcacggtgtcagcgtaaaatcgctgcaaagcatcaaccatatcaccgatccgaatcacattacagtcggacaagtgatcaagctcgctcagacgggttcttcttcaaaaagtcaggctgtgtcttcctatccgcttccatccggtgtgatcaaagtgacgaaaccgctgacgaaaggggagaacgtaaaacaagtgcaaaacgctttatccgctctttatttttatcccgataaaggagcaaaaaatcatggggcggacggcgtttacggcccgaaaacggcaaatgccgtaaaacgttttcaatccgtcagcggattaacggcagacggaatttacggcccgaaaacgaaggcgaaaatagaagaaaaactgtaatcaataaaacggaagctccccgggcttccgtttcttcttacatacaaactgcggcaagggccttttgaatatcataaatgctttcatcttttttaaactgctttgagacagcgggaagttccgcgcctgaaatccaaattttcagctctgaatcaaggtcaaagcggccggcggtttctacgctgaatctggaaatgctcttgtacggaatggattgaatctccgttttcttccccgtgagtccctgtttatcaacaagaataagacgcttatccgtaaagacaatgatatctcggacaagcttaaatgcggcgttgacattctcaccttccagcagaatacgggccagttctgcttttgcttcagccgtcgatattgttgacgcattgcccagcaatccattgatgaaccccatgatatatcccccctgttacgtattctatcaaatcatactataaaaaggtttccattcccagatgagtagagtaaactggtgctgactggaaaaggagagcatgttacacatgaaagatcgatatgacaatttcgcagccctttcagctgctgaatcagaatacagaattatttatgaagaaaaagagggaagtgaatgtatcgtcctcgctccccacggcggcaggattgagccgggtgtcagtgagctggtgcgggcattttctgaccaaagctcaatttacttatttgaagggacgaagcggtgcgataaccgttctctccatttgacaagcacacgctttgacgaacccctggctttagaaaaagtgaccgcccatcattacgcattggcttttcatgggtatcatgatctgaaaaaggcaaatacactcgtcgggggcgcggatctggaaaaagcaagactgatttgtgatctgctgcgtgaagcggggtttgatgccgagctgacagagaagaatgatcggctggcaggtgtaaatcccggcaacattgtcaatcggacaaaaaggaaaatggggctgcaattggaagtgagcacggcgcagagacacgcgctgttcagtaattttggctgccggggagaaaaatatacgccaaccgatctgttttttcggtatgtagaagccgtgaaggcaggtttttatgataaatgaacagggggggcccgttcttacattcactggagctatgcggcgcaagaagtgcttggcgggcagcacggtgagaacagcgtcatgatgcaaaaacctttcctgtgatttaaaatgctgacactctgacggcagagtatcgctaattttcaataaaatacggcgttttttcctcagcggcatgcaagtgtgtctgtccgctttcataatacacattcggccgcttgtcggataacagacaagcgagccgcttctgaaattgaatacctgctttacgccgttcaaacagctccagccttttttccgcaaatgatgccgtcacccggaaagcggctgcgattaaaatgacggcgtggctcctccgctggggaagctccatgtttaacagcataaaggtcggcacacagaagtggtacataaaatggttggcctgaaattcctgcagttccctgaacagcttgttcatatgaaaatggttgccggtatgcttcagcacgtggcacagttcgtgcgcaaaatcctgccattgctcttcgggtgactttttttgattcaggacgatgctgtacatgccgtcccgcttcagcatcatactgtgcgtatcttcaaaatgaatccaaatgtcaagctccttggcaatcatctgcatatcaatatggagaggggcggtcattcccatgcggcaatataagtttttgacgtattcctcaagatgtgttaaaaaatcgcccaattgaatacaccctttcgaacatatgttcttttttaagcgagaaagaaaagccctgatcggactttgaatcaattcccttttcttttaaaaataaacattcagcttttatatcggctgaacgttaagcagtttaaaggaaaagagcggattatttatgtttcggcctgcggtttttctctttttcttttaaataattaatgaattcaatggcctgctgcttgctttccggggaaaagtcctgcatgtcccgatatgcgatctgcaagtcgggatcggcaaacatgtcttcatctgaaggttcttttccggttaacaaataatcagtcgacactttgaaataatccgcaagcttttgcagcgtgtcgtaatcgggttcagatcggccgttttcataatgagaatatctggcgcgcgagacaccgatatgatttgcgacttcttcctgcgttttctttcctctgagactctttaatcttccgcctatcatccgaatgacctctcttttttcaacaccctaagttacttatgattatagatacaaaatgtatcaaaataaagagatgataaaaaaagtatcaaaaaggtcttgatgatacgaactgtatcgtatataatcaacatcataaggatacaaaatgtatcaatttacgataagaaatcgatcaggagggtgagagatgcagccgataatcatccgtttcagcagcaatccggctgatcagagatgtttaggaaaagcaggcggttcgatatcttttaccgcttgcggactaccggtattccgatttgataaccgattgcagtatgaacgctatataagtctgaagacaaacggagacgtccaatatgaatcgtaaaagctacccgtttttcatctattccggattattgaattcagaacattatgacaaaatagggtctgctatttggctgtttttatggttcatcagctcaacgacaaaggaacacgtaaaagacggcgtaaagtgggggatcgtcctcggacataagcccgtaaaagcaaaagaaatggccgacgtatttgccgtcagcgaaaaaaccgtcagacggtggcttgaggttttggaacagcatgaatatatcaaaaccgtccgcgccccttacggactcatcgtctcagtaaagcactcgaaaagattcacgcagaaaaagacattgacccgcccggaagtcacagaccggacaatatcggcggatcaccgggacaaaaatgtccggagagaaatagatataacaaaaaatcatactgctgaagaagcgattaacgacattgccgcccattttatcagattaaggtctgcacaggagaggcggagcgtatacccgtcgccccgggattatcaggccatcgcccgtattgtttccctcggtgcgtcagcacaagaagcaatcaaatggctcggcgaatgctttaccgcttttgaacagcggcgcacctcttcagctgaaacgatcaaggctttcagctattgcgccaagtatatggaagaccgcttgaatgcacgaattgcgggaaggacaatcacaacaaaaaaagagaggaatacgatacatgacaaaacgaacgatcgagcagatactggccgacctgaaaaacggaaaacgtccattactggcggacagaccggaagaatcaggcgaaagccgctttgactgtccgctctgtaaagatcagggcggttatctcaaaaaccagctgggaatggatgtgtgggttaagtgccgctgcgccgccgaacgaaaagcagagcgcattctcagcgcaagtgagattacagatgcctttcggaagctggatttcaaaggatttatcacgcggggcaagcctcaggcagtcgtcgacgcatatgagtgcgcccttgaatatgttgaaaacttcgacaagattaaaaactgccggaaaaacagcattgcccttttagggcgtccgggatcgggaaaaacccatcttttgaccgctctcagcaattatgtcatgagacagaagcagacaccggtgctgtattttccttttgtggagggctttacggatttaaaaaatgattttgatctgcttgatgaaaagcttggccgtatgaaacaggcggatgtgctttttattgacgatctgttcaaaccgctgaacggaaaaccccgggcgaccgattggcagattgaacaaatgtacgccgtcgtgaattaccgctatttaaatcataagccggttcttatctcgagcgagctggcctgtgacggactggtgcaggttgatgaagccttaggcacaagaatttatgagatgtgcagcgattatttagtcatcattaatggcaattcatttgacgtaaaccacagattagagggggcgagataatgtgtaagctgtgcgggccgaagaaggtcattgtgacggaaacgggtttcggcgctgtctttcacccttgcccgaactgcaaaacaggcactgatttaacgccggtcattaaacgtcttgagcgaatggttcaagacgcaaaagcgaggcttgatgcacgtgtataaatatatcaaatggcttttttgcctgctgttcagggcgaaacggatagaaaagcaaattgaagcatggcatgaggctgatggaaagtgaggataaccattgcaagaaaaacacagccccgctccatggagggccgtacacagcggagaagaaaaacccatttacatttattccgcttacagcgaagcggataaagagaagttcccttattcaaacggaaggctcatcgcggccgtttttaacttaagttcatactcacagcagatcaacgcggcattgatggcgaaagccccggaactttttgaggcggccgaaacggctctccgcctgctccggggagaaagttctgaagaaaaagaagcgttcataaataagctcgaaagcctcatacatgaagtaaacatcctgaaaaagacggaggacgtaaaacatgaatcctaaaaaactgactgacattgaacatacaacattaaaaagccagctggaagaaggcaaggttcgggtgattattgtagacggactgaagaaggaagcatggctcgccgaagcgccggagcacggcaaaacgcttgtcgaaacgcgaaaaggggatctggcccgggtcgaatatgaaatcggctttaaattgaattaaaaacagaatacgtccaagacggaaagcctgcggacactgatcaatcgcgcacatgctgcgcattggttggtgtcctttttttgttccgaaaaagaggaggatctacatggaagacttactatttgaatataaacgcacgctgaaagagacgaaaaagtggtacaagcagctggaggaagccgatgaaacgatgcttacttcagaagaactgaaagataaaaaaatcatcagaacgatcattacagatgtggaatatgtcatcgaatggcttgaaaaaggccggcagcccggcataagaagagcgatagaccgcagagacgcttatcagagaatgctgattaaagatcctagaatcatagaaacctattcgcaggcgctgatgtttgaaccttccgcaaatgtgactgaagaagacagaatcagactgcgggacgcattagccgttttaacggatagagaaaaagaaatgctgctgctccacaaagcggaatgcttttcgtatgaacggatcgccgccttgctgaacgtaaagaaatcaaccgtacagacgacggtcaaacgggcgcttctaaaaattcaaaaacagcaggaacaaagaaatcaatcgcctgcttcataagttgtcatacgtttgccacctagaagtgaacagacgatcacaaaaagcggcccgattagaagccgctttttattatagacaatcatgtcggaggtggcggtgatgccgtagcatgaaaaacgcaaaaagagaacaggcatttacaatctatcagtctcatcaaggccgcatcacaaatcgcgcccttgccggcaaatcaggcgtatccgcaagaacgatcggcagatggaaaaaagaagggcgctgggacgaggcgctccataagaacgcggaaagcggcggaaaaaacaacccgggcgaaggtgatgagttaaacgaacgtcagcggctgttttgtctttattatgtgaaaagctttaacgccacccaatctgcgataaaagccgggtattcaccggaaagcgcgcatgtgacgggaagcaggctgttgaaaaacgaaaaagtcgccaaagaaatcagccgcatgaaaaaggaaatggtcaataaagtgtttgtcgaagcgatggacgttcttcaagtctatgtgaaaatcgctttcgccgacattactgattatgtaaccttcggaaaaaaagaggttcaggccttcggaaaatcagggccgctctttgacgaaaatgataatccgattatgcaggaaatcagctacgttgatgttaaagattctcaccttctggacggaaccatcgtcacagaagcaaaactcggaaaagagggcattgcaatcaagctagccgacaagatgaaggctcttgaaaagctgtccttgtactttgaccttttccccgatcaatttaaacaaaaaatcgaaaatgaaaaattaaagctggcacagcagaagatggaaaaaacagaagacagccaaaagccgattgacattgtcattacgcggaaagaggaacggtcatgattgaaaaagcggttaacccgcgctttgaagattatttgttcaattggaatgaaacgtaccaatttctcgtcggaggctatggctcgtcaaaaagctatcataccgcgctgaaaatcatcctgaagctgcttcgtgaaaagcggacggcgcttgtcgtgcgggaagttttcgatacgcacagagattctacttttgccttgtttgaagatattatcggggagcttgagctgggacatgccgtaaaggccgtgtcttcgccgatgcagctgagattttcaaacggaagccggattatgtttaaagggatggacaacccggccaaattgaaatccattcaccatatttcactgatttggattgaagaatgctctgaagtgaagtatgaaggatttaaggagctgatcgggcgtctgcgccatcccgagctttcgcttcatatgatatgcaccacaaatcccgtcggcacctccaattggacgtaccggcattttttccgtgatgaccaaaaaaaacggttcgtattggatgatcagacgctgtatgaaaaaggcaccgtcgttaagggagatacgtattaccaccattccacagcgtgcgataatctgtttttgccgaaaagctatattaagcagctggacagcttacggcattacgatcctgatttgtaccggatcgcccgcaaaggacagttcggcgtcaatggcatccgcgtgtttccgcagtttcaggtcatggagcacaacgaagtaacggagcggattgcttccatcaggcgccccctgtttcggacgggcatggatttcggttttgaagagtcatacaatgcggtcatccggcttgccgtcgatccggatcaaaaagagctttatattttctgggaatattacaaaaacaaaatgaccgatgatcagacagctgaggagcttcaggaattggcggatcaaaaagagctgatcaaagcggattcggctgagccgaaaagcatccaatattttcgcaggcagggtttttgcatggttgcggccaaaaagtttccgggctcaagacttcagtatacaaaaaagctgaaacggttcaaacatatctattgctcagacagctgtcaacatacgatccgcgaattgcagaacttaacgtacgcaaaaaacaaaaacggcgttctgtcggaagatgagttttcaattgatccccacacactttcagccatttggtatgcgctggatgactatgacgcggcggatttgaaagatgcatcacaagaacggagacgtccgaatcgggaaaggaggaggtaggcgttgccgaactatcaaaacgttagagccaccgtctttaaatcaaaaatggccgcgccgcaggcaaggcagatgaacgaagatcaatttgccgatctgtacggcgaagacatcatttcaccgccctataatctcattgaactgaaaacaatcgccgaatattcgacgattcttcagcagtgcattgacgcgtatcgggtcaatattacgggttttgggtttgatgtggaatatacctttgatgtaaatagcccagattgctccccgtcaaaaaaggcccgggccgaaaaaaactggatgaagctggagagcttttacaaatgtcttcattttgatgaatcggccgagacgatcctcggatatgcgatagaagaccgtgaaaaaacgggcaacggttttctcgaagtgcttcgggacggggcgggaaaaccggcggggattgaatatctggatgtgaaacatatgcgcgtctgcggtgtgactgatcccgttgaagttacattttcatatgaagaaaacggcgcatccaaaacgattaaaaggcaaaaacggttccgtaaatatgttcagatgctgaacggtcagaaagtgttttttaaggaatacggcgatccccgcatgatggacatgagaaccggcgaatacgtaaagaccctgtctgaagaataccgggcaaatgaagcgattcacttaaaaatcggcagcggcacttacggaattccgcgctgggtcggcaatatcgtcaatctgtacggcgcccggaaagcggaagaactgaattttatgtatttcaagcagggccgtcacgtgccggccgccattacggttgaaaacggcatgctgtcagaaacctcgtacaaagagctccaggattatatgaatgacctggaaggggtggaaaacgcccacaagtttctgctgattgaggcggaaggtattgcgaaggaaaaagaccttcacggaggcgaagacattacgcccgtgtctgtggaaattaaatcacttgccgaaattctgcaggatgatgcgctgtttcttgaatatgacgacaaaagcagaaataaactccgctccgcgttccgtctcccgccgctttatacgggcgaggcgcaggaatacaacaaagccaccgccgatacggcacggaaaataacggaggagcaggtgtttcagccggagcggaaaacgctgattaataagctcaacacgttatttttgccagaattgggtctccacgatgtacagctcacattaaaagggcctgattttcgcgatccgcttgaaattgcgaaggtgcttacgccatttatttccgccggcgcggtctctcctaatgacctccgtgatctggccggaagagtgctcgggaagacgcttgaggagtggcctgaagagtactacagccggccggtgctgaaagggaaaaaggagcaatcctgaaagggggtgaaaacatctcgtgccgagagaattgagaaatgccgtcatcagttttgtgagctatgtcgataaggcggcgaaccaaacggaattcttttttacaaaatcagccggaggccttccgtcatttgaaaaaaaggtgcaggtgtttacaaaaagcgaatcggatgaacagaagcttgtttacggcatcgtttacgagccggatgtcccggatgcccatggcgattatatgacggctgaagagattgaaaaggccgctcacggttttttggcggatgcccgcaacatcgatacaaatcataattttgaaggcgggaccggcgaggtggtggagtcgtacgtcgccccggatgactttgaaatcgggaatgctgtgatccggaaaggatcttgggtgcttgtcaccaaagcttccgatgaagtatgggatcagattaaagccggtattattacgggctacagcatggcgggaaccgctgacgtttacgaagagccggcagaaaagcaagccggcttattcggcgcggtcaagcaatttctcgaccgtgaccgcaaatcaagaaaccgcaagggagaggacttgaacaagatgagaaaagaggacgtaagagaatcgattgaacacgcgctgcacccgcttttaaagcggcttgacagcttggaccaaaacacggaagacaaagacggggcggctgcgccgtctgatgaagaaaagctgaaaacgcttgtcgaggacatgctcgcgccgattattaaacgcattgaagcgcttgaaaaagtaagaggcgcatcaaagcagccggaagaagagacgggcggccaagagcctgttaaaaaatccatttggagcggactgctttaagcccagtcagaaggaggaactgtagagtgagaaatcaagatatcatcagaaaggcggaaatgtcactttccgctttaaaaagcggcggtttaatgaaccccgcacaagcttcagcatttatccgcatggtgcagaacacgccgaccattttcagcgaatcgcgtgtgattcaaatggaaaatgactcgcagaaatttgaaaaaatcggtttcggccagcgtattctgcgtgccgctgaggaaggaaaagccttaactgacgatcagctgaccgtcccggcaacaagtacggtgcagctgaatacgaaagaagtcattgcggaaattaatatcacctatgacacgcttgaaaataatattgaaaaagacggcctgcagcagacgatcatgcagattttggcggagcgggcggcagtcgatattgaggagcttgtcgtaaacggcgatacatcttcttctgatccgtacttggcacagcttgacggaatccgtaagcagactgtatctcacgtcattgacggaaacggggaagagctgtccagagccacatttaaaaaaggcttaaaagccattccggcaaaatatttgcgcctgcctcaggaattcagattttacacatctcaaggcatggagattgaatggaaagaccgtgtagctgaccgtcagaccaacctgggggatcttgcggtgcagggcggtttgtcttcagcattcggcgttccggtcaaaggagtgtccaatctgcagccttactcggtcggagaaggtgattcccagtacgatgcgtctgacatcattctgactcacccgaaaaatatcattctcggtttttcacgaaatatccgaatcgaagtagataaagatattcgcagccgcaaatttattatcgtactgacggctaaacttgacagcaaatttgaagaagaagatgcaagcgccaaaatcgtaaacgttaaagaataagacgggggtggcagttatgttaattcagccgtctgacgttgtttcatattcagtttatgatcaagtcaaaaacaggccggagccgcttcttatacaggacattctggaggcggaggcggaagcggccagaatggcggggcattcgttcactgatcctatatactcaccgcttcccgaaaagattaagcttgcgttattaaagctttctcaatattttgcgctgatcaaccagaatgaagcggccgcttccgcctatcaatctgaaaagataggcgactactcgtatacggtggcagatgaaggcggaatcagaaaaccggcggtgcaccatctgctctgtgaatatatcgcgccgggttattccccggtttctgcacacgcaaaggtgagacctttatgagctacgaacggctgctcactgacagatgcgatatttatcatgagacggtgtcagttccgaaggccggacgcttcgggattcccgccgaaaagctccagcctgtcttttcttatccggaagttccggatgctgaagacgtgccgtgtctgtttgttgaaaaacagcagcagcttattcagctcgagcctgatcataaagtatatcagcggtttctcgttcattttccgaaagaggccgttgtgcgtgtcaatgacaaaatcatttgggaaggccaggcgtatattctggaaatgccgaagaaagcaagacagcaccattgggaggttatcgctgtgagagatgacagactatgagcataaaaaaccttgaacaatggaatcggtcgctgcaaaaggcatcatccggagaatttgcccgtcaggcaggcgaatggctggaacagtcaggagaggattttctcgacttggtacgggaggagcttattcattcgggagggattgatacagaaagcctgctgtcttctttccgaaaaggagcgcaggatcatgtatggatcattgaaaacgggggactgacccttgaaatcggcaccaatgtagagtatgcctcattcataaatgacggacattggaccgtctcagatgaaaatgtcagatgggtgcccggatattttcaaggctcccagttcatctatgatccgtcagcttcaacgggaatggtgctcaaaaaacagtggatcagcgggaatgggttctgggacaaagcccttcttttgtatgaaacactcttcgccgaatcgctggacaagcgtttcgatcagtggcttaacacgttagggggagatatcggatgaatcgcgaaaccggttcaatcgccgcttttttgtatcagcagtgcggcgtgcccgtatatgaaaatgaactgcctgaacaatttcaggtgccgtcactatacattccgcccccgtatgtttttgacgagaatgacacagtctccacctttaagaagacatacagtctgaatgtgaagctgttccatgccgactcggtgcaggcgctctatgcagccgaccggatcgccgatgcggtgagagaatcaagacagctgattccgctgcttacggaatcaggggaggacaccggtgacttcgtccgcatcagccgtatcgaaacaagagtcggagacaaaggcgaggcagtgatcacaatccgctggacgagccgctactactatcagaaacaaacatctcccgcactgcgggatgtggacattaacagcggggtgaaacaaaagtgaaacaatataaaaagaaaaacgccgcagcggcggaacgagcggttctttatgacacggcggatttaacaaagcacgcgaaggagcttttcggcgtaaaacctgagattctccagggggctttattcggcgtgaagcaaaaacaaatgacaaaagcgcaagcaaagtcttacattgaagcatttttaaccaaggaggtcatgcaataatgaacggcggaacatttacgcaaggaaaagaaaaagaacgtgccgggatctattttaactttaaaacaaccgcccaggagcgggtatcgatcggtgaacgcgggattgtcgcccttcccgtcgcatccggctggggggaagcgaaaacattcgtttccatttcaagcattgaagatttgaataaaaaagtggggctcagtattgaagatccgtcactgattctgcttcgtgaggcgaaaaagaaagcaaaaaccgttttgatgtaccgtctgacagagggaatcagagcgagcgccgatctttcgcaaggtgttaaagcaaccgctttgtacggcggttcaaaaggaaatgacatcatcatccgcatcagtgaaaacgtccttgatcagaccgctttcgacgtgaccacttacatggatgaagcggaagttgacaaacaaacggtgaaaaaagccgaagaattaaaagcaaacggctatgtcacattcacgggaacgggcgaactgtcggcttccatcccgctgacaggcactgaggaagaatccggggaaacgttaaacccgcaggcaggcatccgtcttgcgggcggaactgataaagcaccggtcaactcagactatacggattttttagctgcggctgaaacggagaatttcgatgtcatcgctcttcctgtcgcggaaaacgatcagctgaaagcgacatttgccgcattcattaaacgccttcgcgatgcgcagggacagaaagtgcaaggggtgaccgcccattacagcggagattatgaaggtattatcaatgtgactgaaggtgtgctgctggaagacggaacggagattaaagctgaagatgcgaccgcctgggtggcaggcgcaagtgccagcgccgcatttaatcaatccttaacattcgttgaatacgaaggcgccgtcgatgtgctgcaccgcctgactcatgatgaagtgatcgaacgtctttccaaaggtgaattccttttctcttatgatgcccgtgataagtcagtcagcgttgaaaaagatatcaactcattggtgacatttacggcagagaaaaacaaaaagttcgcgaaaaacaaaatcgtccgtgtgcttgatgcggtgaataacgatttgacacgtgaactgaaagccttaattaaatcgaaaaaaggcacgggcagcgatcttccagcgacaaacgacggccttcaattcgtcaaaacgatgattattcaatatttgacaacgcttcaggatgcgggcggcatcgctaactttgattcagacaaagacattacaatcggccttaatgaagaccgcgacggctttttaattgatctcgccgtgcagcctgtggatgcggcagaaaaattctactttaatgtggaggtaaactaagatggcattaaaagcacaaaatacaatttcaggaaaagaaggccgtttatttctcgatggagaagagatggcgcatattaaaacctttgaagcaaacgtagaaaaaaacaaatcagaagtaaacatcatgggacgccgcatgacggggcataaaacgactggcgccaacggaacgggcacagcgacgttctataaagtcacatccaaattcgccgtgcttatgatggattacgtgaaaaaaggcagcgacccgtattttacgctgcaagccgttcttgacgacaaatcatcaggccgcggaacagaacgcgtcaccctgtatgacgtcaactttgattctgcaaaaatcgccggactggacgtagactcagaggcgctagaagaagaagtgccgtttacctttgaagatttcgatgtgccggaaaagctttctgaaacgttttaattaagatcggtatgagtgaaacaggccttttacaggcctgttttttataaaaaaaagagtaagggagttttcatcatgagtgaaaaaaatgaacaagtatttgatctatcattctttatgccgggtaaaacagtcgaggctgaggagattcgggttccgctttcaaagcgttttgtcgataaaaaaggaaacatcgtgccttttatttttaaagccattacgactgagcgcattgatgaactggagaaggaaagcacgacatataaaaatgtgaagggcagaggccgcgtaaaagacttagacagccagcgcttctatgcgcggatcgcggttgaatctacgatttaccctgatttccggtctaaggagctccgcgacgcttacaaaacggcagatccggtcgaggtggcaaaacgcgtgctttcagtcggcggtgagtatgcaaattggctgaataaagcgattgagatcaatggttttgaagatgaattagaagatctggagcaagaagcaaaaaactgataaaagatgggaataaggaagccgtgtatctctattacgcgatgcatgagcttcattattctccatcagaactgaaagagttatatgaagcaccgagacattttaaggcgctgttgtacggtttaatcggttacaagctggacattcttgaaaaacaagcgaagaaagggggagcgacatcatggcaaagctgaccgcccgttttgaattggaagatcgagtttcaaagaaaataaggaaaatccaaaatggcttcagagcgcttgagaaatataggaaaatgacaaaacgccaaagtgaaattgatatacgcaaagagagtaaatctgttttaagaacaattgaccgcatccagcgctctatgaaaagaaagctgggcgcacaaatgatctctatttcagctgaagacggagccagtgccgtcattcaaaaggtgcaaacccaattagcgggtctgcctgcgtctttaaccattaaaataggagcaaaagacagcgcgacagcggcatttgagagattgcgggatctggctgccggttttaaaggatttaccgtttcactgtatgcgtcagacgaagtgacccctgccatggaacgtatcaaacgctacatgcaatctgcgttaaagaacgggtactctgtcactatacgcgtcatagatcacgtcatgacaacagtcggccgaatttcagcgggtattgattcgctgacgggaaaaaacaatgtcattcaattatcgttaaacgaaaaggtgacagcacagctggctgcaatgcaaaagaatatgccggacgtcggaaaagcttctgcatctgctgctcctgcttcgccgaaaaacgatttttcaatgcttgactccattgcagacaccttcatgaaaaaagtcaatgacatcgcatccaaattttatccggaaacaatcatagcggaactggataaattcgctgcaagctttatgaagaaagcggacgaaatcgcgagcaaattcagccctgcaacgattttggcagagctggataagttcacaacctcattcatgggaaaagtggacgaaatcgcaagcaaattcagtcctgagacgatattaaccgaactggacaagttcacgacctcattcatgggaaaagtagacgaaatcgcaagcaaattcagtcctgagacgatattaaccgaactggacaagttcacgacctcattcatgggaaaagtggacgaaatcgcgagcaaattcagccctgaggcgatattatcagaactagataaattcgctgattcgtttatgaaaaaagtagacggggtcgtgagtaaattcagtccggaagccatattgaaagaactggataaattcactgattcatttatgaaaaagatagatgacgttgtcagcaaattcagtccggaggccatattgaaagagctggatcattttactgattcgtttatgaagaaagtcgacgacgttgtcggtaaattcagtcctgataagctaatcgaccgcgccgaacaatttgtaaatgacacgattgaccgaatttctgagaaattcgattttctcaatccggataagatcttggaaaaagtggagcagtttacatcctcactgttcggaggcattgataaaaagttcggcaaattcagtcctgatgcgatcatcgaaaaagccgaggcatttgttgataaaattgtcagcaagattgcaaagaaatttgagaaattcagcccggacaaaatcatcgaaaaagccggggaattaatagaaaaaatattttcaggaatcgctgaaaaattaggcaaactcaatatcggcggattattaggaggcggcacgaaaaaagaaaagagtaagggcaacagcccgaagcgtcctgatctgacaaagggtccgcagcgcacggtaacagcgccaaaatcttcaggaaagtcagccaaaaaaaccggcggggctttggggggctgctgctgctgtaccggagtgacgaggggcaaaagcagtaaagtcgaagagcggaataaatcttcaaaacgaggttcatccgcaaagggaagcaaacaggcatccgtaaatacgccgaaaacaaaaggggcaggtaaaggcatcggcgcgcttttgaaaggcttgggagattcaaaggcgctaaaaggcggtatgaaagggttaaaaggtgccgctaaaggaattcccggcataggtgaattgttatcactcactgatttagccggcatcaataaagataatgcaggagagaaggtcggctcagcaggcggcggtcttgccggagccgcggccggagcggcaatcggcagcgttgttcccggagtgggcacattaatcggcggcgcggtaggcggcatcgccggcagtttaggcggttccagcttgggagaggcctttgattcaggggctttgaaggacacgtggaatgatatttccaaagcggcgcaaagtgcttggacaacaatacaagatacttggggaagcgtttcatcctggttcatggaaaatgtatggacgccggtt

SEQ ID NO: 65 - DNA, 9718 bp, Bacillus amyloliquefaciens
tagcgggttgttctattttgtaaaagggatggggtagattttgaaatcgagaacacttttgacgattattgtagcggcgctgttggtatgcagtgtagcagtggcgtataagttaacaaaatcccaagctgcagggtcatctgaagaatccatcgcgacaatcggtgataaacatatcacacggcaggactggatgaaaaagatggaagacgagtacggaaaatcaactctggaagacatgattaatgcacaagtagtggaagaacttgcgaaaaagaataaactcacagtttcaaacaccgaattggaacgtgaatttcttttaatcaaagcggtgaataattcattttatgaagacagccatattaccgaaaaagaatggagagaccagatccgctacaacattcttcttgaagaactgctgacgaaggacatcgatatatcggataaggaaatgcaatcattttataataaaaataaagaactgtaccatttcgatgattcctacagaatcaggcacattgtcgtcaaaaacaaggaagaggcggacagggtgcttgctgatttgaaaggcggttccagctttgaagccgtcgccgctgagcgttccacggacagatacacgtctcagtatggcggagacctcggctttgtgacagaaaaccaggaaaatatcccgcaggcatatatcacagaagctaaaaatctcaaagaagatgaatggtccgctgaaccgattaaagtttcttcaggatatgccgtcattcagctgaaagaaaagcttaaagcaagaactttctcatacaatgaagtgagaagtcaaatcagacgccagatcgcgatggatcaattaggtgacaaggcgacagtcaaaacgctgtggaaagaggcgggggtctcttggttctacggggaaaaaagaactaaatgattgacaaaaaattttgaaattgataacttatatttataataccaataaatttagtcggaaattgaggtgtccaacatggtgcgtattgcaaattctattactgaactaatcggaaatactcctattgtgaaattgaatcgcctgacggatgaaaacagtgcagatgtatatctgaagcttgaatacatgaatccgggcagcagcgtaaaagaccgtatcggagcggcgatgattgaagcggctgaaaaagaaggaaaattaaaagccggcgacacaatcattgaaccgacaagcggaaatacagggatcggtcttgcgatggtggcagcggctaaaggtctcagagccattctcgttatgcctgatacaatgagtatggaacgacgcaatctgctgcgcgcatacggagcggagcttgtgctgactcccggcgcagaaggaatgaagggcgccattaaaaaggcggaagaacttgcggaggaaaacggatactttgtgcctcagcaattcaacaatgcggcaaacccggaaattcaccgtcaaacgacggggaaagaaatcgtagaacagtttggtgacgaccagcttgatgcgttcgtggccggaatcggtaccggcggaaccatcacgggagcgggcgaagtgctgaaagaagcatatccatccatcaaaatctatgcggtagagccggctgattctccggttctttccggcggaaaaccgggcccgcataaaattcagggtatcggagcgggatttgtccctgaaacattgaatacggacatctatgatcaaatcattcccgtcaaaaatgaggatgcatttgaatatgcccgtaaaacggcaaaagaagaagggattctcggcggcatttcttccggagcggccatttacgcggcgctggaaatcgcgaaaaaactcgggaaaggcaagaaagtgcttgcgatcatccctagtaacggagaacgttacttaagcacaccgctttatcagtttgaatagagacatacacacggctcccggctgtatccgggagtttttttgtgcctgaagcatcgaaaatccaaaaaacgtttcgaattttatggttggaagtgaaattcacttttttcaccagtgtgattgctttaaaataaaactacagtaaaacgaagcagaggattgatatgatggcacaacgcagaccggcaggaagaaaaataccttttacgaaacaagcatttttacagcgatatgaaaacctttcgaaatcgagaaaacggcatgttctgctcgaaagcgcgagagggggaagattcagtatagccggtctagatccgattgcgtccgtcagagggaaagacggaattactacgatcaagcatgagggagaaacactgtttaaagaaggtgacccgctgcgggcctttcatgaatggtttggaacgctcggaacggaaacaaacgttgagtttccggactttcagggcggtgcgattggttttatcagttacgactatgcccgatatattgagaattttaagatgctgtcgttagatgatctggaaacacccgatatttactttcttgtttttgatgatgtggccgtttatgaccatgaggaagaggcgttatggctcattacccatactgaagcggaagaagcggatcttgcaaaagaaaagctgtccggcttagaggacatgtggtgttccctccaaacggcggacgagcctttttcaccgctgaatcggaatggggacggatcgtacgccgctccgttcactgaggaaggattttcacaggctgtagaacaaattaaacaatatatcgcgagcggcgatgtgttccaggttaatttgtccatcaggcagtctcagtctttatccgttcatccgtatgaggtgtataaacacttgagaaacgtcaatccgtctccttacatggcctatctcgagacaccggggtttcaagtgatatgcgggtcgccggagctattggtgacaaagaaggggaagaagcttgaaacgagaccgatcgcgggtacgcgttcaagaggaaaagacgatgctgaagacaaggctttggctgatgaattaattcacaacgaaaaagaacgtgcggaacacgtcatgcttgttgatcttgagcgcaatgacctcgggcgcgtatcgcgctacggctccgtgcgggttaacgagtttatggcgatcgaaaagtattcccacgtcatgcatatcgtgtcaaacgtacagggagagctgcaggacggatatgacgcgacagacattattcatgcggtgttcccggggggcaccatcacgggagcgcccaaagtgagaacgatggaaattatagaagagcttgagccgacaagacgggggctttatactggatctataggctggttcggattcaacggagatttgcagtttaacattgtgatccggacgatctatgcagccggcggacatgcttttatgcagtccggagcaggagtggttattgattcggttccgaagcatgaatacaaggaatcgttcaaaaaagcttttgcgatgaaaaaggcgttagagctgagtgaagaagagacaaaaaatcagacgaggtgagcagagatgattttaatgattgacaattatgattcatttacgtacaacttggttcaatatttgggtgagctcggggaggaactgatcgtcagacggaatgacgagattacgattgagcagattgaagagctgggtccggacttcttaatgatttctcccgggccgtgcagtcctgctgaagcggggatcagcctcgaagccatcaaacattttgccggcagtattcctattttcggcgtatgtctcgggcatcagtcgattgcgcaagtattcggcggcgatgtcgtcagagcagagcggctcatgcatggcaaaacgtcagaagttatgcatgacggccagacgatttttaaaggcctgcaaaatccgctggtcgccacccggtaccattcacttattgtcaaagcggacacgctgccggattgttttacggtatccgctcaaaccaaagaaggagaaattatggcaatccgccatcatgagctgcctgttgaaggtgttcagttccatccggaatccatcatgacctccttcggcaaagagatgctcagaaactttatagagacacaccgcaaaaaggaagtgtcggtgtgattatatatttgaatggtcaatatatagaggagaaagaagcggcgctttctccttttgaccatggttatctgtacgggatcggcgcgttcgagacgttcaggctttacagcggccggccgtttctgccggatgcgcatgtcgccaggctcaacagggcgcttcgggatctgcagattgcatatgaggtgaacgaacaggagctgcttgatatgcttcggagactgttgcacctcaatgacataaaggacggcagcgcgcgtgtccggcttaacatctcggcaggcgtcagcgataaggggtttgccgcgcagacttatgaaaagccgaccgtcctttgtttcgtcaaccggctcaatccggaaactctgcctgttcaaaaagaaggcaggcttctctctgtccggagaaatacgcctgaaggaacttttcggttaaaatcccatcactatttaaacaacatgtacgctaaacgggagatcgggaatgatcctaatcttgaagggattttcctgaccggagaaggagatgtcgcggaaggcattgtctccaacgtgttttggcgaaaaggagacaaggtctttacgccatctttggatacgggaattctcgatggggtaacaagacagtttgtcattgatgaattgaaacggcaggggacagaagtcaccgaaggccgattccgttttcaatcaatgcttgaagcagatgaagcatggttgacaaactccgtgcttgaaatcatcccgttttctaaaatagaggaagttccgctgcccggaatgagcggaaaaacggtgcaattgctctgtaagcagtatcagcaggaaataaacaaaatgaatgtacaggaggaggaacaaaatggcgcagcaaacaattgaacagcctaaactgattcatacaaaaaaaggcgctctgtcctataaagagaagacgctcgttatggggatattaaatgtaacgccagactccttctcagacggcggcaaatacgacagtacggaaagggcgcttctgcatgcggcgaagatggctgaagaaggggcgcatatcatagatatcggcggcgaatcgacaaggcccggcgcatcactcgtgtcggctgatgaggaaatgtcacgagtcatccccgtcatagaacggattacaagcgagctggacattccgctttcaatcgatacgtataaagcgtccgtggcagacgaagcggtcaaagcgggagcctctatccttaatgacatctggggggcgaaaggtgatcctgacatggcgtcagtagccgccgcacacggggttccgattatcttaatgcataatcgcatggaaagaaactacaacgatcttattcctgatatgcttgcagacttgatggaaagcgtaaaaattgccgcagaagccggcgtcacagatgaaaacatgattctggatccggggatcggctttgcgaaaaactatgaggacaatctggctgtcatgaacaagctggaggtgttcagcgggttaggttatccgctgctcctggcgacatcgagaaaaaggttcatcggccgtgtgcttgaccttccccctgaagaacgtgccgagggaacgggagcgacagtatgccttggcgtccagaaaggctgcgacattgtgagggtgcacgatgtcaaagagatcgcaagaatgactaagatgatggatgctatgttgaacaaaggaggcgtacattatggataaagtatatgtagaaggtatggagttttacggatatcacggcgtattcgaagaagaaaacaaactcggccagcgcttcaaagtagacctgactgccgaactggatttgagcaaagcgggaaaaacggatgacctttcttataccattaactatgcggaattgtacagtgtctgccgcggcatcgttgagggcgagcccgttaatttggtcgagacccttgcggaacggatcgcagacaccgtccttgagaaatttgagccggtgcagcaatgtacggtaaaggttgttaagcctgacccgccgattcctggccattataaatcagtagccatagaaatgacgagaaagaaatcatgaacaatacggcatatatcggcctcggttccaatatgggcgaccgtgaacattatttgcgccaggcagtggccatgctcagccgtcatcatggcgtgacggtgtcaaaggtgtcctccatatatgaaacagatcccgtcggctatgaggatcaagatcagtttctcaatatggcggttgaagtgaaaacggcgttatctccttttgaacttcttgacgtaacgcagagcattgaagctgaattaggcagaacgagagagattcgctggggaccgcggacggcagaccttgacattttgctgtataatcgtgaaaatattgaaacagagcggctgattgttccgcatccgagaatgtatgagcgcttatttgtccttgcgccgttaaaagaaatatgtccgcaggcggatcatatcacggtaagcgctgaaacaaaccaagaaggtgtaagagtatggaagcagaaatctggggtaggcgaattcgtgcattcagaaagctgaaaggttatactcaagaaggatttgcaaaagcattaggtgtatcagtttctattgtcggtgaaattgaacgcggaaaccgattgccgtcagatgccatcattcaagatgcggcagatgttttaaatataagtgcggacgaattggccccgcctgaaaaatagacaaataatgaaaggaggggaaaaatgtttaaaatcggtgatattcaattgaaaaaccgggtcgtgcttgcccctatggccggtgtctgcaactcagcgttcagattgactgtaaaggaattcggagccggattggtatgcgctgaaatggtcagtgacaaagcgattctttacaacaacgcaagaacaatggggatgctttacattgatgaacgtgaaaaaccgctcagccttcagatttttggaggaaaaaaggaaacccttgtggaagcggcgaagtttgtagatcaaaacacgactgctgatattattgatattaacatgggttgtcccgtacccaagattacaaaatgcgatgcgggcgccaaatggctactcgatcctgataagatttatgaaatggtatccgcagtagtagatgctgttgataagccggttacagtgaagatgagaatgggttgggatgaagagcacatttatgcagtgaaaaatgcccaagccgttgaacgtgccggcggaaaagccgttgccctgcacggccgcacaagagtgcaaatgtatgaaggcactgcgaactgggatatcattaaagaagtgaagcaatccgtctccattcccgtcatcggaaacggggatgtcaaaacgcctcaggacgcgaaacgcatgcttgaggaaacaggagttgacggcgtcatgatcggccgggccgcactcggcaacccgtggatgatttaccgtacggtgcactaccttgaaaccggtgagttaaaagacgaaccgaaagtccgtgaaaaaatgtcggtatgcaaactgcacttagatcgcctgattaagttaaaaggcgaaaatgtggcagtcagagaaatgagaaaacacgctgcctggtatctgaaaggtgtcagaggcaatgcgaatgtacgcaacgaaattaaccaatgtgagacgcgtgaagaagttgtgcagcttttagatgcatttaccgccgaagcagaggcaaaagagcttcaagatgcaaaagtaggttaatatacaccctctattgctgctcactgccagcttgccgctggcagtttttctgctttttcgtgaaaacaaaatgtaacggagtgataccaatgagtcaagaagagcaaaatcatgaggaattgaacgaccagctgcaagtcagacgagataaaatgaaccagctgagagaaaacggcattgaccctttcggcgaacgtttcgagagaacgcatcaatctcaacagatcattgacgcctaccaggatctttctaaagaagaactggaagaaaaagcgatcgaagtgaccattgcaggccgtatgatgacaaagcgcggaaaagggaaagccggctttgcgcatctgcaggacttagaaggtcaaattcaaatttacgtaagaaaagacagtgtcggcgaagaacaatatgaaatctttaaatcttcagacctgggagacgttatcggcatcacggggaaagttttcaaaacaaacgtaggcgagctttctgtcaaagcgacatcttttgaactgctgacaaaagcactgcgtcctcttcctgataaatatcatgggttaaaagacgttgaacagcgttaccgccagcgctatctcgatctcatcgtaaaccctgacagcaaacaaacgtttatcacacgcagcaaaatcatccaagcgatgagaagatacttagatgaccatggatacttagaagttgaaacacctacgatgcacagcataccgggaggagcgtctgcacgcccgttcatcacgcaccataacgcgctcgacatgcctctttatatgcgtattgcgattgaactgcacctaaaacgcctgattgtcggcggattggaaaaagtctacgaaatcggccgtgtgttccgtaatgaaggtgtttctacacgccataaccctgaattcacgatgatcgagctgtatgaagcgtacgccgattataaagatattatgagtcttacggaaaacctcgtagcacatattgcgcaggaagtgcttggaagcaccacaatccagtacggagaagagcagattgatctgaaacctgaatggaaacgactccacatggtagatgcggtcaaagaagcgacaggtgtagatttctggaatgagatgactgttgaagaagcgcgcggtcatgcaaaagagcatggtatcgagatcacaaattcaatgacggtaggtcatatcatcaatgaattcttcgaacaaaaaattgaagaaacactcattcagcctacatttatttacggccaccctgtagagatttctcctcttgctaagaaaaatccggaggaccctcgctttacagaccgttttgagctgtttatcgtcggccgtgagcacgctaatgcgtttacggagctgaatgaccctattgaccagagggaacgctttgaagcgcaattaaaagaaagagaagaaggaaacgatgaagcgcatatgatggatgaagacttcgttgaagctcttgaatacggcatgccgccgaccgggggattgggtatcggtatcgaccgccttgtcatgctgttaacaaatgctccgtctatcagagacgttttattattccctcaaatgagacaacgctaataaaagggaaggcgccgtttctgcttatcgcagtacggcgcttttttagaaacaagccgctcataaaacttttttgattttcttttgaaaaactattgcactattatttgcgaggtggtatattattattcgttgccgctaaacaaggcgctgacgaaaaaaaagaaatttaaaaagttattgacttcaagagattgataagatataataataaagtcgcttgaacgaaagacaaaatgatctttgaaaact

SEQ ID NO: 66 - DNA, 28314 bp, Bacillus amyloliquefaciens
gcgtgtctttcagcgcggctttgagcgcttcaatatcgtcctgccgaggcgcgacataggcgcaaagcgcggtattgcccgctttgtcttccacggccgtcaccgctgcgtcatgaacgtccgcaagctgggcgaggcggacttcgatttctgaaagctcgatccggtagccccgcactttgacctgctggtcgatacggccgatgtattcgatgccgcactgcgcgttccatttgacgaggtcgccggtccggtacatgcgctcgccgggcacgaacggatctgcggtaaaccgcttcgccgtttcttcctcacggttcaggtatccgcgcgcaagaccgcggccggccacacacaattcaccggcaatgccttccggctgcacctgatcgccgtccccgagaatataaactctcgtattggcaatcgcccgtccgatcgaaagcgatccttcctccggattgatgacgccgcttgtcgcgacgacggtgttttccgtcgggccgtagttgttgacgatcgtgtacggctgtttcaccgcccgcttcagcttgtcaccgccgacgagaagcatacggagagaggtattttccagctccataaattgttcggccagctgcgtcggcaggaaggtgatggtcacgccgttctcctcgaaatagtgatttaagcgggtgatatccagccggatcgcttcgtcaatgacgtgaagctccgcgccgatggtccatgtcgggaacatttcccagatggaggcgtcaaaaccgaagcccgcgtatttggcgcttttatcatccgccgtcatggcgaatgcgtcgtgatgccagaagcacaggttcaccagcgcatggtgttcgaccatgacacccttcggctgtccggtcgttcctgacgtgtaaatcatataagcgagatgatccgccgttgtttccgtctgcgggttcgcttcatcgttttcatcaagcggcaggctcagaatggagcgtccgccgtcaagcagaatcgtttctcctttgtagctttccggcacgtccagcgcttcctgtgtgagaagaagcttggcgccgctgtcctgcaggatgtagctgatgcgctcttccgggtagtcggggtcaatcggcacaaatgccgcgcccgctttcaagacgccgagtacgcccgcggccatttccaaggacggtttcgtcaaaatgccgacacgttcgtcagccgtgacgccgcagtccatgagaatgcgtgcgatgcggttcgcccttgcgttcagctcgccgtacgtccacttcgcgccgttgtatgccgcggccggccggttcgcgtggcgggcggccgtttcctcaaagagacggtgaaccgttttgtcccgcggcacagaaattgtttttcctttccatgcgtcaaggagggcttgtttttctgttttattcaccaatgaaagcccagaaagcttcgcagccggattttccgctgctgcttctaacagttgaagccagtaatgcttccatgtctctgccgtttccggtttaaacagcgcggtgttatattcaagcacaaacgttaagccttcgtctgtgtcctcagccgtcattgtcaggtcaaacttggctgtttttctgtcaaacggatggtgcttcagctcaattccttccatgaccagatcttccgcatttgcattttgcattgaaaatactgcatcaaacagcggatttctgctcgtatcacgctgcacctcaaccttttgcagaaggtcttcaagcggataatcctgcgcgtcaaatgcatgtaaagcggtttgtttcacttctttaagatagtccgtgaacgttttgtccgcttccggatacgtacgaagcgcgagtgtattcacaaaaacaccgatgacgtttgcgagatccgcatgtgaccgtcccgcaaccggcgaaccgacaatgatgtcatgctgtccgctcagttttgagagaaaggcgctgtatgacgccagcagcaccatgtacatggtagaatctgtttgtttcgcaagactgcgaagagccgacgtctgttccccagtcagagaaaagaccagcttgtctccttcaaaggtttgcacggccggacggctgtaatcagccggcagcgtcaataccggaagctcgccgtcaagctcccgaagccaatgctcctcctgcttgcggtactgctctgattgaataaatttctgctgccataccgcatagtctttataatggatccgcagcggatcaagcgtttcgccgccatacaagcgggacagttcatctatcagcacgccgactgaagcgccgtccgaaatgatatggtgcatatcaaacagcaacaggtggtcatgttcagccagcttgaccagtcccgttctgacgagaggaagctgatccaggcggaacggccggataaagctctgaataatccgttcagcatcttcttcagaggcttcataatattccatgtcgatatcagcttccgcccatatgcgctgaaccgtttctccatcctttatgtcaaatgtcgttctgaaggcttcatggcgttctgtcagctgtttcatgacggatttcagcttttctgcatcaagctttccttttaagcggagcacagacggcatgttatagcttgtttcagcgccttccagctgctgaagcacaaacatccgcttctgcggtgaagaaaccggatacgtttcccgctcggcagccggtgcgatgctctctgccgttttccgctcagccccttcaatcagctgcgccagccccgcagccgtcggagaagtgaacagatcctttaaggtaagctgcacgccgaatgtcttctggataagggccagcagtttcatccccgctaacgagtggcccccgatctcaaagaactgatcatggacgccgacccgctccatttgcagcacctcagcccaaatatccgccagtttttgttctgtttcattgcgcggcgccgtatatgacacggcattcgctgcggtcacatccggcatcggcagcgcccgcctgtcgatttttccgttccctgttagaggcagttcatccaattgaataaagacggacggaatcatataagccggaagatccttcgccgtatgctccctcagctcccgggaagagatttccctgaggccgacaacatacgcgcaaagaagtttgtcacccgcgccctgatccacagcgagcacaatgcattcctgaatctggtcatgactttgaagctgatgctcaatttcgccaagctcaatccgctgaccgcggattttcacctgatggtcgatacgtccgataaactcgatatcgccattcggaagccatctggccaagtcgcccgttttatacatccgttcaccttccttaaacggatgctttacaaatttttcttccgtcagttcaggacggttgtagtagccttctacgagaccttcaccgctgacgcacagctctcccgcgataccggccggctgaatgcgtccggctgagttcataataaagacttccgtattgctgaccggtttcccgatcggaacggagagcgtatcctcttcaatgacatccactggatggtatgtcgcaaacaccgtgctttccgacgggccgtacatatgaagcagtcttccttttccgactgccgccagcgcctttttgacatgttctactgacgctctttcgcccccgaacatgattttccgaagcgtcgtcagacaggacggctccatatcaacaagcaggtggaacagggccgtcgtaatcatcagaatgctgacgttctcccgtttgatcacacgggacagacgtgacatatccagcaccgtatctttcgggacgatcacaagctttgcaccgtttaacagcgaaccgaacatatcaaacataaaagcgtcaaagacgtagtttgacagaccgagcactgtgtcctcttcagaaacggtcaaatagttcgtgttctttaccgttcgcaaaatgttggcatgtgtgacgatgtttcctttcggcgttcccgtcgtgccagatgtataagtgagattggcaatcgttttggaatcaaacggcaatgctggattgtgagagtccttttcatagctcgcctcatcatcagcaagcacaatgacgccttgaaaaccggccttttccgcaagcggcttgaggctttgctgagtcatgagcacattcgccccgctgtcacggaagaaatgctgaatccgctgaaccggatgctcaggatcaatcggcacataggcggaccccgcttttaacacagccataatggaaacaatcatatccattgaccgttcacacagaacagccgcggttttcccgccgcctccgactgaaagaatatgccgcgcaagcctattggcgcgttcattcagctgctgatacgacagggtttccccttcgaactgaagagccgtccggtcagggttctttcgggcctgttcttcaaagatctgcacgatcgtttgctctttcgggtacgccgtgcgctccggattgacccgctgtaattgagtcaaagcctcccgttcagaaagcagatcatattcgctgattttcacatccggctgagctgccgcgctctccagcagacggacatagtgcgcaagcatgcgatccgcagttgagcgcttaaacagcttcgtgcaataatccaaatcaagcgcaaggccttccgctgtttcccgagcctgcatggtcaggtcgaatttggcgatattgaagtttgtttcatgaagagacagcgtcagattaccgatctccggaataccgtccgaagcattttgcagactgaacatcgtgtcaaatatcggatgcctgctcatatcccggggcacgttcagctcctcggtcagccactcaaacggataatcctgatgagaaaacgcgtccagcacctgcttgcgcacatgacctaacaagccggcaaatgtctgatcctgcttcacggagcttcgcagcgcaagcgtgttgacaaacatcccgataagcccctcggtatcagagtgatttcttcccgctgacggtgttcccacgatgatgtcttcctgtcctgaatacttagaaagcagcgtatagtaagctgataacagcaccatgtaaagggtggctccgtttttctcggcaagcttctgcagccgttcccgcagcattttcggcagcttggcggacacgcggtcaccttcaaagctttgcacctgcggccgcggataatcagggagcagctgaagcaccggcagttcgccgctgaagacttctttccagtacgcccgctccttcttgtagccttctttcgcccgttccgcctgccatacggcataatctttatattgaatgcgcaattcaggcagctgatttccgccgtagatgtcagccagttccttcagcatgatggaaatagacaccccgtcagaaatcaggtgatgcatatcaaacagcagcatatggcgattgtgatcgagcgtttgcaggccgattctgaacagcggcgcctcagataaatcaaaacggcgcacaaagtccttcatgacctgttcattcgttcttccgcgcgcttcaatcatttcaatatgaaacggaacatgttcgtgaatcacctgtctcggcgtgccgtcctctgattgaaacgatgttctgagcgcttcatgcctgctgattaaggcagaaaatgcacgctcaagcttttcacggtctaaagcgccctcaatcatggccgcagccggcatgttatatccgactcccgcgtcttcaaattggctcgcgatataagtccgctgctgagcgagcgaaagcggatagctcgcctgcttctcagccggctcaatcgcactgaatgccggtccttcgtttcggttttccgcataatcggcaagcgccgcaatcgtcggatgctcaaacaagtattgcagcggaatttcgacgcccatttgcttatgaattttcgtcagaagcgtcatggcctttaatgaatgaccgcctgactcgaagaaatgatcataaatgcccgccttgtccattccgaggacttcctgccagatgacggtgagcgtttcctccgtttcatttctcggcgcggcatattcggatgaactgacagcctgcacatcaagcgcaaacagctttttgcggtctgccttcccgctcggcgtgagcggaatttcgtccgtttttgtaaagtaagcgggcaccatgtaatcaggaaggtgctttgacacatactctctgtactcggcagggtgaaactcggttcctttttcctgaacgatatatgcgcagacatctaagctgccctgcagatccggccgtgccagcacgacggcctgcgccgcgcccggagcttttctgagcaccgtttcaatttctcccagctcaatgcggtagccgcggactttcacctgatcatcttcacggccgatatattcgatcgtcccatccggcagccagcgcgccatatcacccgtgcggtacatgcggccgcttccgttaaacgggtcctgcaaaaacttctctgcggtcaaatccggaagatttaaatagccgcggcctacaccgtcacccgcgatatacagctcaccggccgtgccgtcgggctgaagccgctggtgcttatccaatatatacagacgggcgttgccgagcggtttcccgatcggaacgtacgccgcctgttgattcattccgttatcggctgacacctgatgcacggacgcatctacgcacgtttctgtcggcccgtagacattcgtcagacgcggcgccctgcccgattgatgaaagagcgtcatcagctgttcagcaacagccgcggacaggccctctcccccaatgagcatgtggcgcaattcaattccgctgacatctcccgccgcaaccatcatctgcagatgcgcaggcgttccgtcagtggcttcaatccggttttgacgataatagtccagcagtgccgagccattcgtcacagtcgttttcggcacgatataaagcgtctgtcccaaaagaagcgaggcaaaaatctgtttgacggacgcatcaaaatgaaacggagccaaaagcgccattcttaacgtctgctcaccgcattgataaatctcctgctgcagtgattgcaccagatgatgaacttgccggtgctcaatcatcacgcctttcggccgccccgttgtacctgacgtgtagatgatgtaagccagccggtctgattgtgtgctgacaccgtccgcagccgtttcaaactgaacagcctcgtcaaaatcaatccgttcggcatccgctgcaggcacctgtattccggtctccgtcagaacagccttcgctccgctgtcctctaaaatgtactgaatccgatccgccggaaagtcaggatctatcggcacataagcgccgcccgctttcaaaattcccaatattgccgcaatgacacgctcagatcggccaagcagcaccgcgacaggagaatcggctgatatcccggcttgaagaaggcgtccggcaatacggcctgattgttcatgcaatgtgcgataggacaatgttcggccttcatacacaactgcgggtttgtcagacagtgacttcactttctcttcaaacagccccggtatcgtcatctccttgcggtaattcaccggattgccggaggcccgtttcagcagccgctctttctcggattcagaaagaagagtaagttcatcaattatgcgatcaggagatgaaatcgcatcttcaatcagcgtgatcaaacgttcagaaacagattcaatctcttcccccttgaaaatgtcgctgcgatagtcaaaatcaattgtcagtttcccggtgtcccatcgttccttcacatgaatcgaaatatcatttgtaccgcttccgctgaaaatagggtctgtcaggaaggacagattctcttttttctgccactgcatcacctggtactccagagccaccgtaaacaatctgctcagcgaacttttcgaagcacgcaaatcattgacaagcaggttatacggatacttttggtggcggagaattttcatcagatccttcatccggcctttaacgaattccaagaacgactgtcctccgtcaacgcttgtccgcacaggcaccgtagatacgaacatcccgagcatctgcttttctttcgcattcgtccggtttcccataaacgtacccgtgacaacgtcatcccggccggtcactttgtagagataagtgatcagagctgactggaacagagacagtacgctgactttatgctcctcgcagaatgaatgaatgcggccatataagtcgtgaggaatttcttgagaaaaccgtttcgcatcaagacccgcatctgcccggctccgtttcagggacacaagctccggcacggtctcaaactgcccgttccaaaagtcccgatccttcttaaaccgcttcgactgcacatattcctgctctgtcagcacgtgctcgataaaagaaggaatctccgtctgttcctcacttgtcccgcctgaaagctccaaataaatatcagtaatcgcattgcccagaatcgtcatggaaatcccgtctgaaataatgtgatgcacattagcgtaaaaccagacctcattttcactgatcgtgtgcacggaaaaacggaataaatcctgatcatataacgccagaggcttgccagcttcttcacgcccccattttgacagctcgtccgcagagcagccggcttgcctgatatccgtgtgcccgatagagagcggacggtattcgctcacatattgaacgggctccccctcatcatcaagccgcagacggattctcatcgactcataccgccggacgaattcctgtatcgctttctcaacgtaatgagcctgtacgccgtcttcagaaatgagtttcccgaacccggcaagatttgaaatacttgtgttcggatagaatttttctgtataccagatacgtttttgagcatttgttaaaggataaaaagttatttccatatgtgtgcgcctcccctttttaagatatagttgtcaattctcccttagaaacagcctccctctatgtccctaactcattctcaagccaaaagaaccacttacctcaaaaacgatcccgattcaatcaccgccgaaatccgtcatccgttcacccgcgcagtccgaaatacggcatcaaatttatgagaaatcaagacaaaaagccattgattgtaagcacgaaaggtttacctatttctgcatgtatttctatatatctacttacgttcactttatatgaaaatattgtttttatcaccgaaaaatgggtgaaaagtttcatgcggcacaccgaaaaaaaatccgacaaatccagagggtattttgcggcatcccgcaatttattttcaaaaatattatttacgtaaaattaaaaatctttaaactataatgaaaatctgtcgaatatccagttatggcagaaataaaaaaaatttacgtacgtaagctgacccggaaaaaacagcgcaagaaccgaaacagacggcccgaatgttcgcaatatgatttcattaaaccgcaaaaaaagcactctattttacatagagcacttcaaaaagattcctttattgcagttttatcaatgttgattaattccatataatcttttccccacttatacatggcgtccagaatcggcataaggctttctccttgcgccgttaaagaatactccactttcggagggacgacagggtaaacttccctgtgaacgatcagatcctgctccagctccctgagctgattcacaagaattttgtgcgtaatatccggaattaaagctttcagctcattaaaccgcttcgtcccttcttttcccaagtgccacataatcagcattttccacttcccgcctatcacggcaagcgtcaattccttttcgcaattaaacgttttctcatccattcggctcacagacaattctccttcctcttactttttgtacggtcatcatctattcatacacgcttactttttcacacaactttcatcagtttatactaccacgcagttttgctgaaacaaagcgcattgcctgcggggacagtatcctcaaagtaactattagacttcaaagtgcgtacttctcaacatgcggggcactctatagaatggaaatacatgaaaaagaggagtggatataaagtggaattacagctggcattagacttagtaaatatcccggaagcaattgaacttgtgaaagaggtcgaacaatatatagatgttgtagaaatcggcactcccgttgtcattaatgaaggactgaaagccgtgcaggaaatgaaaacagcctttcctcacttgaaagtgcttgccgatcttaaaatcatggatgcaggcggttacgagattatgaaagcggcagaagcgggagccgacatcatcaccgttttaggagcgacagacgactcaacgatcaaaggggccgttgccgaagcaaaaaaacagcagaaaaaaatcctcgtcgacatgataaacgtaaaaaaccttgaaacacgggcaaaagaaattgaccaactcggtgttgattatatttgtgttcatacgggttatgatcttcaggcagaaggaaaaaattcattcgaggaactgacggcgattaaaaaagcggtcaagagcgctaaaaccgcaattgccggaggcattaaacttgatacgcttcctgaagccatcaaacaaaacccagatttaatcattgtcggcggaggcattacgggagctgacaataaagcggatgctgctgctaaaatgaaacagctgatcacacaaggatcatgaaaacgactgaatacttacatgaaatactaaatgaaatatcccgcaccgcagcattaatatccgacagtgaagctgacaagcttgcggatcagattttatcggcagatcaaatcttcacgtccggagcggggcgttccggctttatggctaaagcgttcgccatgaggatgatgcacatcggcctgaacgcttacatcgtcggtgagacgcttacccctcccctccaagaaggcgatctcgtcatcatcagctcaggctcaggcgaaacaaaaagtctgcttcatacggctgaaaaagccaaaagccttaacggcatcatcactgcattaacgattaaccccgcttcaagtctcggcaaacttgcggatcttacaataacgattcccggctctcctaaggaagagaccggcggagacagaaagacgattcagccgatgggttctttattcgaacaaactcttctgctgttttacgatgcggttattctaaaaatcatggagaaaaaagaattgaattcagcagacatgtttacaaagcatgcgaatctggaatgatttgctgacggccttcttatcagatggccgtctttttatcgtcttgttgcgcacggtcatacaggccaaggttttcgggtcagacactcgcagacgaagatatcctgccggtgagcttatcgctataataagtcaattgacgatacggccgcaaccattcatttctgaatagggaaacggcaaaaacactttctgatcgaatttttaatgaataaagttgatttgtgcggatggttttacagatattcagctgaattgcggctgagaaatatattttaacagctttacagccggccgattctgctttattcttggaccagctttacagcaattaaaactggaggtgattgatactcttgaaaacattaaaagcactgctgcttgttcttatcatcattgccggagcagtcgcggccctgatcaagggtgatcttttctcagataacgagcaaaccgttcagaagagtgattacgacaaggtaatcctatttccgtccgatcgatatccggaaacagcaaagcatattaaggacgcgataaaagaagggcattccagcatatgcaccattgacagagacggagtacataagcggcgtgagcaatctcttaaacatgtgcctgtcaaaacgggatacgatagggatgaatggccgatggcggtttgtaaacagggcggaaacaacgcctccgtagaatatatttctccggcagacaaccgcggagccggctcatgggtcggacaccagcttaccaatgatcccgacggaacgagagtattatttaaaattaagtaaaaaacaggaggaacagcgcattgattaaatcatggaaaccgcaagaactggccatttcttatcatcaatttacaatcttccaaaaagattcagaaccgcctgttatcgattggaccgatgaagccattgaaaaaggatatgcggaagctgacggagctgtttcatttgaggcaaggagaaatacgagggcatttatcgttctcaggcttaacacaagtgaaccggtaccatcctatgagaaaaaagcgactgttccctttgaggctgtaaaagatggaattgagattgaaagcgtgatgtcaaagcggcttttctttcatattccgaaaggccgatacagccttacctgttattcagtgcctgccgaaatatccgatcttcatgcggatacgtatattattgatgcagccgtaatgtaaaagaaatccctgagagaatcatatttctctcagggaacttttataaacttttaccgtttgtttcaattacattccggtaccaataaaaactttttttcctgatccgtttcaaatccttttcatcttcttcatctcgattgatatacacaaaaccgtagcgtttttgatagccgttcagccagcttaacagatccgtgaatgaccagctgcagtagccgatgagatgaactccgtcactaatagccactctgcactgtttacccatactgaaggtcctttaccgtctttattccaggctccttcagcctgataggcagccgaggctgactcccatagaaatgtatcagggaacaggccctgttttttatgtatcatgtgtttcatcctcctgatgcctatgatattgatatcatacgttatgaaacgcgtttcagagcaatcccgataaaaacaaaaaagcatccggcttgccggatgcttaagaatgatgatgccgcttttccaatttatgaggcggaggcttcgggacaaacccattttgtttcatcatgttaaagcgcctgtccatatgctgtttaatatgttctgctttttctttcggcaggaccccgtactcgacatatttggatatgacatgttttcgtttttcgagcacttctttttcaagtgattcaatttcttttttctgctgttccgtgagtgacattgttgaaggcatttttgttccggcggcgtgtgccggcattgtgaaaaccattgctgtaatgaaaaacgcagctaaagacaatgcagctcttttcatgattctttcctcctttaacgtttgttatatgtttctccctcatccattttttatgcaaaaaaaagagcgaaattattcgctcttttcaatcgattcgtccggcagcgcgtacgtgacatacgttcccgctacaaaatcgtggattgaccgtttgtcttctctcattccgaccatgaatgcgctcacgatcacaccgattccaaacgtcaccccatatatcaggccgcccacaagcactctcaaaatcatagtgagaaagcctacctgagttccgtcttttttgacgatgcggataccgcagatctttttgccgataacataaccgttccagtagacagggagcaaaataccataaagagtcaaaataatgctgatcattgcgctctcattcggatcttttcctgttgccagcataaaaataatcgccaaaggcactgaagtaattaaatagtcgagtaccacggctcccaatctgatccaaaatcccgccggtctgtaaatattcatcgtgtttctcctcactatggctttaaaatcactttaatgttgccatcttcttttttgtcaaatatatcatatgcagcaggagcttccgcaagactcattttgtgtgtaatgatgtccgtcggatcaatttcattttgttcgatcatttgatacagcatcggcatcagatgaataacgggtgcctggcccatttttaaagaaacgttgcgtgtgaaaaaatcaccgagcggaaagccgtccgcttcagaaatgtatgcgcccgtgagctgcacggttccgaacttcttaacggcttctgatgctgtaagaatcggactgatcgttccgaactgattcggtttttgctctgttttttcttttgacagcggcgtgccgtccattccgacacaatcaatcactacatccgcgccccctgacgtttgttcatgcagcagtttcccgatctcatcatgttctgaaaaattgaaggtctctgctccgtttatgcgtctcgcatgttcaaggcgatgcgggacttgatcgactgcgataacccgctttgctccttttttccacgcgaatttttgcgccattaaaccgatcggacctgatcccagaatcacgactgtatctccttttttcactccgctgtgctggacgctccaaaaggcggtcggcatgacatctgacagaagcagcacatgctcatcttcaagctcactgtctgccggaaccagaaaagaagagaaatcagcataaggaacacgtaaatattcagcctgcccgccgggataattaccgttaaactccgaaaaaccgaataagccgccggcatctgtatgaggatttggattagattcatcacactggctttccatctggtgctggcaataatgacattctccgcagccgatgttaaaaggaatcacgacccggtcgccttttttcagctttttgacttgactgcccgtttcttcaacgattcccatcggctcatgcccgacgatataacccggatcggcgggtattccgtttttatataaatgaaggtctgaaccgcatatcccggttgcggtgattcgaacgatgacatccctctcatcttgaatggcgggtgccgggacttctttcacttccatatgttcttttccttggtatgtcagtgctttcacacttggtcagctcctttttaatcactccttcccttttcacctgcttctaaacttggccggaatgttattcggcccgctgaatatcccattgaaaaggatcttcaagctgcgaccagtcggaatcgaactcagacggcgtgagcaggcactgatccaattcctttgtaatggctgcttcatgtaaatctgttccgataaacaccaggttcgtatgacggtctccgaattggtcgtcccaatcttccagaatctccggttcctgctgtttaatctgctcctgctcaagtttcggcattgccgccacccaataagaaacaggctcaatcgaaactgccggacccgcctgagacatcagcagcgcaaggctgttgcgggttgcgcaccaagcaattccttttgcgcgcacaatgttgtcaggcattgattgatgcagccagctgtcaaaacgaacggtatgaaacggcagacgccgcgagtacacaaacgaagtgatgccgtactcttccgtttcgggagtgtgcgcttcatgacctgccgtcagctcctttatccatcctgctgatgaactcgcttcctcaaactcaaataaaccggtattcaatatgtattcggcgggcacttctccgcggacggaccggatcagtctggcacggggctgtaatgcgcgaagaaccgtttccagctgttcaagctctttttcgcccaccatgtcgcatttatttaaaatgagcacatcacaaaactcgatttggtcaattaataaatcggcaatcacccgttcatcctcttctcccgccgcttccttccggtcaagaaggctgtcaccggactggaaatcatgccagaagcggtttgcatccaccacggtcaccattgtgtccagcctgcagaaagttgtcagatcaatgcccatttcttcatctatataagaaaatgtctgggcaacgggaatcggttcgctgatccctgttgattcaatcacaatataatcaaatctgccgtctttcgcgagtttctcaacttcgactaataaatcttcacgcagcgtgcagcagatacagccgttggataattctacgagtttctcatccgtccttgacaagccgcctccctgcttcaccaagcccgcgtctatatttacttcgctcatgtcattgacgatgacggcaatttttaaaccgttgcggttttgtaaaatatgattcaaaacggtcgtctttccggcaccaagatagccgctcaatactgtaaccggaatttttttcataaaatagcctcctgacaaaatagaatgattacgatttacatcccgcacctgccttattttcatcatgatgtacattgttataaatcgtaatcgttactatttattctgatatattctccgtttaaaatcaagtgaaaaataatcaatcataaaaaagacacgctgtcatacgtgtcttccgcccaaacttaaacatccgcaggactgttttcagtgccatagctttttctccaaaaatagcctgcggccagaacaagcacaaatgcgagcaatgcgatacatgaaaaagagataaaaccgatcgcataagttcccgtcatctgcttcaatgatcctaaaatattcggaaggaaaaacccccctatgccgccggccgctccgacgatccccgtcaccattccgatttcttttgcaaagtgctgagggacaagctgaaataccgctccgttgcccataccgagcgccatcattccgataaacagcagaacgacaaccgttgaaagcggaggcaggctgctgactcccgccatacacagagccgcgatgacaaacagtacagcgagaactttcgcacctcccgcacggtctgaaatccagcctcctgctgggcgaaaaaaactgcccgccgcgacacatattgtaacgaaatcaccggcatggatttttgacaattgatattgatcaacgaaaaaaatcgccaaaaaacttgataatcccacaaaacctccgaaagtgacgccgtacaaaagacagaaacaccatgtctccttctgcctgaaaacgtgaaggtagtttttaagcggctgcggtgcgggctgtgcaggagagtccttcgccatgacgataaacagaataaaaacgatcatcaacggaagaagcgcaattcccattacactgtgccacccaaactgttccgcaaggcggggaccgaacaatgtcgcaaacaaagtgccgctgttgccggcacctgctatccccatcgcaagcccctgcaagtgaggcggataccaccggctcgccatcggaagcgcaacagcaaaacttgcgcccgctacgcccagcagaatgccgatcgcatacagctcagtcaaagaacggccgccgaatgccccccaaagcagcgggatcatcgtgatcagcatcccgatcacggctgttttcttcggcccgatcctgtccgttaacacacctaaaatgatccgaaacacagatcctgataagatcggcagagccacgacaaaccctttttcaaaagaagacaacccgaaatcctgagaaatataaacgccgagcgcccccagcattacccaaatcataaaactcacatcaaaatataggaaggaacagagcagagtgagcggatgaccgcttgtttttaattccgacagcttcataacattctcctttccggtcttctatcatttcaaattgctgaatcaagaatatatgaccggcattcaccggaaaagacatgtgtaagataatgcgacacatttaatgcgttaatcaggcaatgtgccataatttctcatagagaagcaatcttacaggcagctgcaaaggaggtttggcgaatgaagaaacaacgattaattgcagcagggaacggaatggccggaatccgctgtattgaacacattttaaagatgaaccgtgacatgtttgagattgtcattttcggaagcgaacctcatcccaattacaatcgcattctcttatcctccgttttacaaggtgaggtttcgcttgatgccattacgctgaatagccgcgaatggtacaaaaaaaacggaattacgctttacacgggagaaacggttgtagacattgatacagaacggcaggttgtcacaacggatcgaaagcgcagcatgacttacgatcaaatcatccttgcaactggctcctctccttatattctccccatacccggagcagagaaagaaggggtctgcggctttcggacaatagaagactgccaatcccttatcaatgcggccggccggtatcaaaaggcggcggtcatcggcgccggtttattaggtcttgaagcggccgtcggcttacggcagctcggcatggacgtcagcgtcattcaccactcttcggccattatgcaaaaacagcttgatcaaacggcatcacgcctgctgcagaaagagctggagcgaaaaggcttagtctttcttttagagaaagacacggcatccattacaggaaactcacgggcggaaggcatccgtttcaaagacggttcttccatagaagcagacctgattgtcatggccgccggtgtgaggcccaatatccgattggctgcatctgccggactttcagtgaaccgaggaatcatcgtcaatcaattcatgcagacgaacaaaccgaatgtgtatgccgtcggtgaatgcgcggagcatgacgggattgtatacggattggcggcgccgctttatgaacagggaaaagtgctcgcgcagcatctatgcggcgtcccgtgcgaagggtttcaaggctttacacaatctgcagccttaaaaatagccggtattgatgtatggtcggcaggaaaggtgcacgaggatgagcacacagccggcatattgttccatgatgagcatgcaggcatctacaaaaaagcgctctttgaggacgataaaccggccggctttattttattcggggacacgcgcggtaaacagcggcttctcgacagtcttgtgaagcaaagagatatttccatcgtgaaaaaacagctcatggaaccggatcaaggcggtatatcctttgaatccatgcctccccatgaaaccatttgccaatgcagctcagtgaccaaggggtccattgaagaagcggtaaacaaatatggcttaaaaaccgcggaggaagtaaagcacatgacaaaagcgtccgggtcttgcggaggatgcaggcctctcgttgaagacttgctgaagtatatggcgagcgatgattacacaaaaccctcccgccagccttcgttttgcggctgcaccgatttgacggaagaagaagtcatcgcggaactttggcgccgtccgttcactgatgccgccgaggtaatgaaagagatcggctggaaaacagaaaacggctgccgcatttgtattccggcgcttcactattacctggaaaggacgcggcctgattttatgcagttcaatgaaatatcggcagaagagacatgcaccctgattccgcaaatgtacggcggactgacaagtgcggcagagctcaaaaacatcgcagacgtcatcgaagaatacggcatccccggcgtttcgatgactgacagtcaccggctgaggctttccggaatcaggccaaatgaccttgcaagcatcagaaaagcactgaacatgccggttttctccccccggcaccgctggacgattcaaatcagagcatgtacgtgcggacagcatcgctcctttcaagagctggcaagcaggattgaacgagataccgacatgcttgccgtacccgcttatgtatccgtcagcttgtcatgtgaaaacaattgcaccgatgcttacattcaggatatcggcgtgcttcagacacaaacttgctgggaagtttatatcgggggcgtccgcggaaaacaagcccgcgccggcagccttttttgtgtgacgaataacgaagacagtaccgccgctatgatgaaaggccttattcagtattatcgcgaaacggctcactacaacgaagcgatttaccaatgggttgacagactcggcctcgtccatatcagagaaatgctgtttgaagaagatatgcggacacagcttctgaaaaatcttcgttcagacatatccctgctgcaaaacctgtctgccgggaaaacgccatacgaaaggatgaagctttttgactgaaccgatgctccgttatttccgtgacaaactgcaagatattcaatcggaaaaaacatatgagacgcaatgcccgttctgcagcatgcaatgcaaaatgcagcttacggaacaaaccttcgcggcacggaagaaatacactgcaatcggcattgataatccgacgacacatggccgtttatgtacaaaaggcatgaatgcccatcagcatgccgtgcactcttcccgcattacacgccccctgtttaaaaaaaacggtgaatttgtgcctgtctcttgggctgaagcactgaatcgcattaaggaacaaatcaatctgatccaaaccgaacacggcaatgatgcgatggccgtctacgggagcgcctccattacaaatgaagaagcctatctgctaggaaagttcgcacgggtcggcttacagacgaaatacatcgattacaacgggcggctctgtatgtctgccgcagcaacggcggccggccagacattcggcgcggacaggggcctgacgaatccattatcggacattccgcatacacgcgtcatcatcctggcaggcaccaatatcgcggaatgccagccgacgatcatgccgtattttgataaagcgaaagaaaacggggcttacattatcgccattgatccccgggaaacggcgacgaccaaaatagccgatcttcacctgaaaatcaagcccggcacagacgccgccctggcaaacggactcgtcaaaatctgcattgacgaacagcttacagacaaagactttatccgcacacgaacaaacggattcgataagctcaaacggcataccgacgctttagatctgaaagagatttccgagcagacaagtgttcctttggagcatatgcgaaaggccgccgtgaagtttgccaaggaaacatccggcatgctgtttacagcgcgggggatcgaacagcagactgacggtaccgcggcggtgaaagctttcttaaatatggtgctgatcacgggaaaaatcggcaagcccttctcaggttacggggcgattaccggtcaaggcaacggacaaggcgcgcgagaacacggccaaaaagcggatcagcttccgggctaccgttctatcgaaattgaagaacaccgggcgtatattgcgaaggtgtgggggattcatcaggatgagctgccgcgaaaaggcgtctcagcctatgaaatgatagaaaaaatagctagcggcgacatcaaaggactgtttctcatgtgttccaatccggctgtttccggcccaaatgcgaatttcgtcaagcaagcaatcaagaaactgagattctttgtcgcagttgatttatttatttctgagaccgcggcattcgcagatgtgattttacccgcctcctcttatttggaagacgaaggcacgatgacaaatgtagaaggccgcgtgacattaagagaagcgagccgcacctgccccggagaagcgaaacatgattggcagattatctgtgacattgcctcggctcttggtaaagggcattattttccctatacgtcagcggaggaaatctttaacgaactgagagaagcgagccgcggcggaattgctgattacgctggcatcacctatgacaggctcaggcgggaaggcggcattcattggccgtgtccggaatctgatcatcccggaactgggcgcttgtttacagaatcatttgctcatccggatcaaaaagcggcattaagtgtgattccaaacgaaccacctgttccaaaagagaaaccgtcagccgattatccgctttatttaacgacaggcagagtcatgtctcactacttaacgggtgtccaaacgagaaaaagctctgccttggctgcaagacatttcgaatcctttgtggaaatccacccaaaaacggcggccgactatcatatcgaagaccgtgttctcgtgaagatagaatccccccggggcagcatcacggtccggagcagatggtcggaaaacgtacgaaaagacacgttgtttgtccccatccattggtctgacacgcaaaacgtcaacgatttaattggtgaagccttggatccggactgtaaaatgcccggttttaagatgtgcgcggtacgaatcagccctatataatttttcataaaatttttagattttttagtattttttgttacatttcataacatgcaccttaaatatttgtttttgctgtgctacgctaaagaaaacatagataaggagcggatcatctgatgggaaaaaaacagctagtccttgttggaaatggaatggccggggtaagagcgattgaagaaatactgcgtgtttcaaaagacgaattcgagattacaatattcggggccgaacctcatcccaactataaccgaatccttctgtcaaaagtgctgcaaggcgataccgacattcaagacattacgttaaacgattggaactggtacaaagaaaacaacattcagctgtataccggtgaaacagtcatcaaagtcgacacggaaaataaaaccgtcatcacagatgcagacagaatccagccttacgatgaactcatcctggcgacaggctctgtcccttttatccttccgattccgggcgcagacaaacaaggcgtcacggcattccgggacataaaagatacagatacgatgctcgcggcgtcaaaacaatataaaaaagcagccgtcatcggcggaggactgctgggattggaagccgcacgcggactgctgaatctcggaatggacgtgtctgtcatccacctcgccccattcctgatggagcgccagcttgacgcagcggcgggacgcctgctgcaaaacgaattagaaaaacaaggcatgacctttttccttgaaaagcaaaccgatgaaattctcggtactgaccgtgtcgaaggcgtacgcttcaaagacggcacaagcatcgaagctgacctggtcgtcatggcggtcggcatccgcccgaatacacagcttggcacagaaagcggcattccggtaaaccgcggaatcattgtcaatgattatatgcagactgacattccgcacatttacgcggtcggtgaatgtgccgagcaccgcggaatcgcatacggtcttgtggcgccgctctatgaacaggcgaaagtgctggccaaacatatttgcggcattgacacaaaaccgtatgaaggctccgttctctccactcaattaaaggtatcaggcgtcgaagtcttctctgccggtgactttgacgaatcagaggacaaaaaagcgattaaagtgttcgatgaacaggacggcatttataaaaaaatcgtcctgaggggcaatcaaattgtcggcgctgttttgttcggcgacagcagcgagggcggccgcctgttttctatgattcaaaaagaagccgatatctccgaaacctccaaaatatcaatcttacagcctcttgaccaggaagcaggcgcaagcatgaccgcggcgatgagcgacgatgaaatcatctgcggatgcaacggcgtttcaaaaggtgcgattattcaagccattcaggaaaaaggctgcacatcaacggacgaaatcaaagcatgcaccggggcatcccgttcctgcggaggctgtaaaccgctcgtggaagacattcttcaatatacactgggctcagaatttgacgcgtccgcgcaaaaagaagcgatttgcggctgtacatcactgtcgagagatgaagtcgtagaagaaatcaaagccaaagggctgtcccatacaagagaaatcatgaacgtgctcggctggaaaacgccggagggctgctccaaatgccgtcctgccctcaactactacttaggcatgattaatccggctacatacgaggatgacagaacatcccgttttgtgaacgaacggatgcacgccaatattcaaaaagacggaacatactcagtcgtgccccggatgtacggcggcgtgaccaactctcaggatctccgtaagatcgccgatgtcgtcgacaaatatgagatcccgctcgttaaaatgacaggcggccagcggattgatctcatcggcgtcaaaaaagaagacctgccgaaagtatgggccgagcttgatatgccgtcaggctacgcgtacggaaaaacactccgcacggtaaaaacgtgcgtaggcgaacaattctgccgcttcggcacgcaagattccatggcactgggcattgcgcttgagaaaaaattcgaagggctcaatacgcctcacaaggtcaaaatggccgtgtccgcctgccctcggaactgtgcggaatcaggcattaaggaccttggcgttgtcggcatcgacggaggctgggagctttatgtcggcggaaacggcggaacccatttgcgcgccggtgatttgctgatgaaagtaaaaacgaatgaagaagtcttagaatatgcgggggcttaccttcagtactacagagaaacggcaaactatctggagcggacatccgcatggcttgagcgcgtcggtctatctcatgtccaatccgtattaaacgatccggaaaaacggcaggagctcaacgacagaatgaatgagacactctctgtccacaaagatccgtggcaatacttccttaaagataaaaaagcatctaaagatctattcgaaaatgtcgtcacgacttcataaaacagtaagggggaacggacatggttaataaagatatgacaaaggtttgcataggcaaagtaagcgaattacccgaggagttaggaaaaaccgtatatatagaagataaagagcttgccgtatttaagctttctgacgggagcgtccgcgccgtcgaaaatcgctgtccccataaagggggcgtcctggctgaaggcatcgtcagcggagaatacgtcttctgtccgatgcatgactggaaaatctccttagaagacggaaaagtccaagagccggatcatggctgtgtcaaaacatacgaaacactgattgaaggagagaatgtatacctcctgtattgagcaaagaccggatcactttttcaagtggtccttcattttttaaattgctgaagggatgacgccatcatgaaaaacggaatcgtatattttgtcggtgccggaccaggagacccggggctgatcaccgtaaaaggaaaacaggctctggagaaagcggatatcattttgtatgaccggctcgcaaacccaaagttccttgaatatgcctcaccggactgccggttcatttattgcggaaagctgcccgaccgtcattttatgaaacagtctgagataaatgccctgctgattgaaaaagcggcggagggctgcaccgtcgtccgcttgaaaggcggagacccaagtgtgttcggcagagtcggcgaagaagcggaggcgcttcatcagcacggcatccgctacgaaatggtgcccggcatcacctcgggaatcgcagcgccgctgtatgcgggagtccccgtcacccatcgtgatttcgcttcgtccttcgcgatgatcaccgctcatgatacatcattgcaaggcaggccgaatctcgactgggaagggcttgcccgaagcgttcaaacgcttgtgttttacatgggcgttaaaaatctgtcgtttatatgccggcagcttatggagtacggaaaatccccttccgttcccgtactcgtcattcaatgggggacgtgggggcggcagcgaagcgttaaaggaacgcttcaggacatccatgaaaaagttcaaagccaaaacatcaccaaccctgccattatcgtcatcggtgatattgtcaattttcaaacacacagctggtttgaaagcaaaccgttcatcgggcggcatatcatggttgtcactcatggcgatgaagaacatacattgacagacaagctgcgcgagtatggcgccgatgttattgaatggccgaagcggatcgttaaaaaaatgcccgcaaacgaaaacatcctgaaacagatcagcacctttgaacaactatttttcacatcacgccttgcggtatgcgaattctttgacacactggctttcaagcagatcgatatccgccgggtgaccgcaagcctgaatgcagcgactgaggccgcaaagacggaactgacaaaacggggctttctcctatccgaatgtcaaattgattctccgcattcactcattgtaggaagccgtcaagcagcagaaaacttgtcagactcaaaatcatgcccgttttatatcacccatgagcatatcgcggatgagcggttcacttccatgatcgaacgcacgatcagtgagtctcctctgcaaatgattatctgtacgggcaaagaatccgctcagcatttgatcagcgccggaaaacaaatcggcatatcaccggatccgtcagcaaaccgccctcccgtcatctgcatgggcgaagacgtccccgccggctgcgggtttaccgccgtgaaaaatcaggaacagttatttgcgtttatacgaaatgaaatgaaagacatgctcgttcacagctgatacccggaatgcttttctgaccctcaggctcaacatcgggggtcagcccttttttattgtgtcaccaattttttatggtgagtcgaatacatcgccatctgatccgcctgcgggtccaaataggctttggcgctgttcacggcggtcggcccctccgtgaaaccgccggcaatcaatctgagcttgctttcataatgggcggcgtcaccggcgacaaacacgcccggaagattcgtccgcatatgtctgtcagctttaatcctgccttcttctatctcaaacccccagtccttcatcggaccgagatcaattttaaacccgtggttgataatgagctcatcaagcttgatgacttcagaaagtccggactcagtttggcaaatggtgacgctctcgatccgttctccggtgccgttgagatgcttcagtcgatacggcgcaagcacccgcacggaagaccgcttcattttcgcgacgctgctttccaaaccgccaaactcctccctgcggtgcaagacggtaacagacgccgcaatcggttccagctcattcgcccagtcaaccgcggtatctccccctccggaaatcacgacatgcttatctcgaaacgcatcaagcttctctaccttataatgaaggttctttcccgaataacggctcgcatccgcgctgtcaagttcattgacctcaagcgttcccatgccgacggccaaaatcaccgtgcgcgtatagtgcttttcccctttggaactttccagcacaatggttccgtcttccacccgttcaaatccagtcacccgctgattcaacacgatatccggcttaaatgtcgcagcctgttccttcagctgcttaatcagctgttctccggcaatcccgggtattccgccgatatcacggatgattttttcagggaaaaacatagacactttccctccgagccgcggcaaaaactcgatcactttcgttttcagctcgcgcatcccgcaataaaaagccgcaaacaggccgatcgggcctccgcctataatcgtgacgtcatacacctcatgattttccgccatcgttctgcctcccgtttatatctatacttcaaatatttttaattgagaatcaatatcaatgaaagtataacacatattgaggagcagtgtttattcatttctcatcttgcggaaaaggagtgattcagaagtgaggttctgagattgataagcgggaaggtattaaaactgaaaccagtacggcgactggtttcttttttatctctttttcatcagcatgatatcgaggtacagctggcaccttgtcctgaagtcgtttaaattaattgatgtcatgtcaagaatctgtttgatacggtagttcaatgtgttttgatgaataaaaagctgttctgcggctggttttgttttgcagttattgaggagatagatttctaacgttttcagcagttctgtactgctttctctgtctttggcttttaataacgctaaatcatcgtttacatattccagtgaggcgtttttttcttcgatgctttcaagatagcggtaaatcccgagcttactgtattcgtacgggatattttcctggttt

SEQ ID NO: 67 - DNA, 16680 bp, Bacillus amyloliquefaciens
ggacgccgccaagctatcattacggtaaaggcagctcataatgagctgccttttttgtttataagtattgcttcaggaaattagaaacgtaatacggaaatttgcgttccgtgacatctaagaaccggcggatcatcacataatcatcactgacatgctgtgtcagcagttcataccaccactccgtttcatatctcgcaatcatcccgatattgtagagaaccaaataatgagtaatcatttccggaagatgcaggaagtgatcacgctgagagggaatataatattgatttttctccaagtgaaacaataaatttggcgaagaccaaggttctctgtctatcgggtcagcctcaaaaaccaagtggttatggtctttcctcagaaaagaccacttcaaatgttggctgatatactcagcaaagcgggaatcagacatattgtaatgaatcaccgcatgctcaggcactgaaataaggtcatctttcagctctactcgggtcagccaattctttttctcttggaagtaaaagacagtatgcaattcaggtatggctgtcagcaatttcttcattgtgtaccgttcttcctcaagaccagctatcccgaataagtgcttcattacatgaatacataagccattgcgctgcaccttcacttcatcatccctaaaggagtaattttgctttttgcgtttccgggcagtcacgccatgcgcgagtactgaggcgtggcttggatagcttggatctgtggtcagaaggcaggctttcagcaattgtgacatcccgtaaaacaacagaataggcttaatttctaaaggggaaagagatgcctgcttatagaaggactcggcgtgtttgataaagaatatgaagcgctcactgttcttaaacgcatatcgttttggttcttccatgccgctttctgtatagactttatttagaaatttctgggaagattctacggaataaaataatgataactctttccactcatgatctctcatatgtatttttaaaccctttcctttatctaaatatttcaactctttttcgcttccttgacatgctgttttctagttgataatctacatataatattttgccgaaaagagggggatttactaatgtgggaaagtaaattttcaaaagaaggcttaacgttcgatgatgtactgctcgtaccggctcaatcagacgtacttccgcgtgatgtggatttatctgttgaactgacaaagacgttaaagcttaacattcctgtcatcagtgcgggaatggatacagtaacagaatcagctatggcgattgcgatggccagacagggcggcttgggcattatccataaaaacatgtccatcgaacagcaggctgaacatgttgacaaagtcaaacgttctgaacggggcgttattacaaatcccttctttttaacacctgatcatcaagtattcgatgcggagcatttgatggggaaatacagaatttccggtgttccgatcgtagataataaagacgatcaaaagcttgtcggtatcattacaaaccgtgatcttcgctttatctctgattattcaatgaaaatcagtgatgtcatgacaaaagaagagctggttacggcttctgtgggaaccacattagacgaagcagaaaaaatcttacagaaacataaaattgaaaaacttccgttagtggatgaccaaaacaaattaaaaggtcttatcacgatcaaagacattgaaaaggttatcgaattcccgaattcatctaaagatgaacacggacgccttattgtcggcgctgcggtaggcgtgacaggcgatacaatgacacgcgtcagcaagcttgttgaagcgaatgtcgacgttatcgtggttgatacggctcacggacattccagaggcgtactgaacacagttgcgaaaatccgtgaaacatatcctgaactgaacattatcgcaggaaatgttgcaacggctgaagcgacaaaagctctgattgaagccggagcaaatattgtcaaagtgggaatcggacctggttctatctgtacgacacgcgtcgttgcaggtgtaggcgtaccgcagatcactgccatttatgattgtgccactgaagcgagaaaacacggcgcgacaattatcgcagacggcggtattaaattctccggagatattacgaaagcgttggcttcaggcggacatgccgtaatgctcggaagcctgcttgccggtacttcagaaagcccgggagagactgaaatctatcaaggcagaagatttaaagtgtatcgcggtatgggttctgtcgctgccatggaaaaaggcagtaaagaccgatatttccaagaagaaaataagaaattcgtccctgaaggtatcgaaggacggactccgtacaaaggtcctgtagaagaaacagtgtatcagcttgtcggcggtcttcgttcaggtatgggatattgcggttcaaaagacttgcgcgctttaagagaagaggcacaatttatccgtatgacaggtgccggacttcgcgaaagtcatccgcatgatgtccaaattacgaaagaatcaccaaactacacaatctcataattgttacaaataaaaaacatttgacagggtcgctgactctgtctattttttttatatcgagtgtgataaaatttatactgttgtattttgaatttgaatatgtccttaacggcttaattatagatttaaaatgaatgacggaggtcgtaagattgaacatcacgaaatggaaacagctgttggtgtcattagtggtactggcactggccgcaacttgctttgttccaatgtctaaagcggaggcagccggcaatgacccgattgatgtcaacgcatcagctgcgataatgattgaggcttcatcgggaaaaattttatacagtaaaaatgcagacaaaagactgccgattgccagtatgacaaaaatgatgactgaatatctgcttctggaagccattaaagaaggaaaagtgaaatgggatcaaacgtatactcctgatgattatgtctatgaaatttctcaagacaacagtttatcaaacgtcccccttcgaaaagacggcaaatacacggttaaagaactgtatcaggctatggcgatttactctgccaacggagccgcgattgcagttgccgaaattcttgccggaactgaaacgaaatttgtcgctgaaatgaatgcgaaagccaaagaattaggcatgacaaactatgattttaaaaatgccacagggcttgtgaatgaagaccttcacggcaagcagccgcaaggagaaggcgttaaagaagaaagtgaagtttctgctaaagacatggcgcttcttgcagaccgcctgatcactgattatccggaagttctcaaaacaacaagcatcgctaagacgaaattcagagccggcactgatgatgaaatggacatgccgaactggaacttcatgttaaaaggtcttgtttctgaataccctggcgttgacggcttaaaaacgggttctaccgattctgcgggatcttgttttacaagcacagcacagcggaacggaatgcgggtcatcaccgttgtactaaacgcaaaaggcaacctgcataccggacgttttgatgaaacgaaaaaaatgctcgattacgcatttaaaagcaatttctcaatgaaagatctttaccctgaaggctctcaagtaaaagggcacgaaacgattgacgttgaaaaagggaaagacaagcaagtcgatattgttactgacaaggcgctttctattcctgtgaaaagcggggatgaaaagaactataaagccgaagtgactttagataaaaaagaaatcacggctcctgtgaaaaagggaacgaaagtcggaacgctgacagttacatacaaaggcagtgacaaagactatggcttcctcaaatccaaagagttcagcgtgaatcttgtaacgaaaaatgatgtagataaagcgaactggtttgttcagatgatgcgcggcatcggcggattcttctccggaatctggaacagcgccgttgacacggtaacaggctggttttaagaaataagaaagagctctgatgaaagttagggctcttttgcttaatatactgaaaaaaccaaattattagtaaaaaatgatatctatcttattcatctcgctgtaaaataagaatacccatatgaaatattgtatttctgggatacaataagagatagaaattatctaactatacattgactagggggaccaaataatggctcaaacaggtactgatcgtgtaaaacgcggcatggcggaaatgcaaaaaggcggcgtcatcatggacgttgtaaatgctgaacaagcgaagattgcggaagaggcgggagctgttgccgtaatggcgttagaacgcgttccggctgatattcgcgctgccggcggtgttgcccgcatggctgatccgacaatcgttgaagaagtaatgaatgctgtatccattcccgtaatggcaaaagcgcgtatcggacatatcgttgaagcgcgtgtccttgaagcaatgggagtagattacatcgatgaaagtgaagttctgactcctgctgacgaagaatttcatttaaataaaaacgaatatacagtcccgttcgtatgcggctgccgtgatctcggcgaagcaacgcgccgtatcgccgaaggagcttccatgcttcgtacaaaaggcgaaccaggaacaggaaacattgtggaagctgtccgccatatgagaaaagtaaacgcgcaagtgcgcaaagttgttgcgatgagcgatgatgagctgatgactgaagctaaaaacctcggcgctccttatgaactgcttcttcaaatcaagcgtgacggcaaactgcctgtagtgaactttgctgccggcggagtagcgacgcctgctgacgcggcattgatgatgcagcttggcgctgacggcgtatttgtcggttcaggtattttcaaatcagacaaccctgctaaattcgccaaagcaattgttgaagcaacgactcattacacagactacaaactgatcgctgagctttctaaagaattaggcacagcaatgaaaggcatcgaaatctcaaatctattgccggaacagcgtatgcaagaacgcggctggtaaaaccataggagagctggaagcatgttaacaattggtgtacttggacttcaaggagcagtaagagaacatattcgttcaattgaagcatgtggttcaaaaggtgtcgtcattaagcgtcctgaacagctgaatgacatcgacggcttaatcctgccgggcggggaaagcacgacgatgcggcgtttaatggatacgtatcattttatggagccgcttcgcgagtttgccgcccaaggcaagccgatgttcggcacatgcgccggtctgattattttagccaaagagatagcaggaacggataacgctcatttagggctgttgaacgttgtcgtcgagcgtaattcctttggccgtcaggtcgacagctttgaagctgatctgacgattaaaggccttgacgagccgtttacgggtgtatttattcgcgcgccgcatattttagaagctggagaagatgttgaagtgctttgtgagcataacggacgcatcgtggctgcaaagcaggggaatttcctcggctgctcgttccatcctgaactgacggatgatcaccgggtgacagagctgtttgtgaagatggcggaaaagcataagcaggaaacagctgtataaaacagttgaaaaccgctgatacttatagtacattataaacacaaataaagatcgaaaagcgttgacaggaagcagtagggagcccctctttcaaagagagccgatgggtggtgcgaatcggtgaaagatgctgtccgaatccgtccttgagcgaaatgctgaaaacaagtaggcatttacgggaaaaccgttatgtgttaaagcgggaagcaagtgtgagcttgttttcaatcagggtggcaacgcgagagctctcgtcccttttaggggatgagggctcttttttattttcgataaaaacagataggagttgttaggcatgattgatacgaaggtgctgagagccaattttcaagaggtaaaagcgaagctcattccaaaaggcgaagacttatctgactttgacaagtttgaagagctggacgaaaagagaagagagcttatcggtaaagtagaagaactgaagggaaaacgcaatgaagtgtctcagcaggtcgccgttttgaaacgggagaaaaaagacgctgatcatattattaaagagatgcgtgaagtgggcgaagaaattaagaagcttgatgaagagcttcgtactgtcgaaacgacgctcgaaaccatccttctgtccattccgaacatcccgcacgattcagtgcccgtcggggaaacggaagatgataacattgaaattcgcaagtggggagaggcgccggcattttcatatgagccgaaaccgcattgggatatcgcagaccatttaaacattcttgatttcgaacgcgcttcaaaagtaacaggcagccggtttgtgttttataaaggattaggcgcccgcctcgaacgcgcgctctacaactttatgctggatcttcacgttgatgaatatgattacacagaagtcatccctccttatatggtaaaccgtacgagcatgacaggtacgggacagcttcctaaatttgaagaggatgcttttaaaatcagagaagaggattatttcttaattccgacggcggaagtgccgattacaaatatgcaccgcgatgaaatcttatccggtgagaagctgccgatcaattatgccgcattcagcgcctgcttccgttcagaagcgggatctgccggccgtgatacacgcggtttgatccgccagcatcagttcaacaaggttgagcttgtgaaattcgtgaagccggaagattcttatgaggagcttgaaaaactgacaaatcaagccgagcgggtgcttcagctgctcgaactgccgtatcgtgtcatgagcatgtgtaccggtgatctcggctttacagccgcgaaaaagtacgatattgaggtatggattccaagccaagacacataccgtgaaatttcttcttgcagtaactttgaggccttccaggcgagacgcgcaaacattcgattcagacgcgaagcgaaaggcaagccggagcatgtgcatacattaaacggttcaggccttgcagtcggcagaacagtagctgccatcttagaaaactaccagcaggaagacggaagtgtcatcattccgaaagtgcttcgtccttatatgggaaataaagaagtcatcaaaccgtaaaaggtgcgccctagaggcgcgccttttttgctgcccggtatagagcggcggcattccgggctgtgctttcaaggttaaaacggccggatgctaaggcgtcttcaagacttacagcgccgggtacgatagaaaatacagctgttattcctgcgctgtaaacatgctcgaaatttttgcctaaggagcccgccaatgcgataacgggaatttcttgagcagatgcgcgtgcggcgatcccggcgggggttttgccgaatatcgtttgttcgtctatctgcccctctccggtaatgacaaggtcagcgcctcttatctgatctgagaaggacagtgtatctaatacaacatcaatcccgctttgaagttctgcctgtaagaaagcgatcagtccggcgcccagtccccctgcggcgcccgcgccttttacggtatccgcttcgatatcgtgctgacgtctcaatatgtcagcgaaatggcgtaagttgcgatccaatacaactttagtcttctcggacgcccctttttgcgggccgaagacatatgatgcgccgttttcgccggtcaggggattttcgacatcacatgcggcacggatacggatatgtttcagttcaggggagagaccgcctatatcaatagaagctagggtgtgcagagcgcctccgccgtcaggtatctcctgaccttccttatttaagaaacgcacaccgagcgcgctcgccattcctgttccgccgtcattggttgcgctcccgccaagcccgatgatgatctcacccgccccgcgggaagctgcatctgctatcagttcacccgttcctcttgtcgttgtgttcaacggatctctgagatggcggggaatgagatgaagccctgatgattccgccatttcaatgactgccgtgcgtccgtctcccagaagtccatatgcggcgtttaccggcgttcccagcggaccggtcacagtttttttgatgatgcttccgccagtggcatccgtcaaagcctgaacggttccttctccgccgtcggccgcgggtatcttgatatattccgcgtcagggaagaccgctttgaatcctatttctatactgtcagcggcttcttttgatgtcatgctttctttgaaagaatcgggtgcaatgatgattttcattatgttctccacctttatgagcaggttatctgtttgaatatattcttgatttttactgtgttttcctgcccgtatggcatactgaggttgaattgaacgcaagacttttgtatgatagtaaagctgacggacaagccgtttaagaaatgaaataaaaaatatgaaaaagcgcttgactgaaatttaggtcatgtggtatattattaaatgtcgatacggaggaatacccaagtctggctgaagggatcggtcttgaaaaccgacaggggtgtcaaagcccgcgggggttcgaatccctcttcctccgccatattgattttaaacctaatgaaactcgagcatatattggagattgttttgtccgctgcatgtgatgcagcggattttttatatgcaaaaaaagcgattttctctgttcggggaaaatcgctttgctatttttatttatttctgttttcgttgatcacgtgactgattttttcgatcaaaggttccagtgactgttcatcagcttcaaggtcataatcttcaatgcgtactttcagcacagggcaggcgttaaaaccgctgatccagtcttcgtaccgtgtatacatctcttcccaataggagcggtttgtctgcagctccatctcgcggccccgcttttcaatccggtttataatgttttcaaggtcgccttctaaatagatcaaaacatcaggatgcgggaagtacggcgtcatgaccatcgcctcaaataggcttgtgtatgttgtgtaatctgtcagcgacatggttcctttatcggcatgcatttttgcgaatatgcctgtatcttcataaatcgaacggtcctgcacgaatccgccgcctgattcaaacatgtttttctgctctttgaaccgctcagccagaaaataaatttgcaaatggaagctccagcgttcaaaatcgtgataaaacttctctaaataagggttttcatccacttcctcaagtgaggtatgaaacccgagccgttttgccaaagctttggtcaaagtcgattttccgactcctaccgttcccgctactgttataatggcgttgtttggaatatgaatgtctttcatttaataagctcctttacctgacgggcaattctttcatagtctgtcttattcaaaacaaagtcttcagtatcaccgtcaatggtcagtacagatatatccggatcttcttcctgaagctgtctgatggctgtgtcgtaatctgcaatgagacgttccagatattgatgttcgatatttttttcaaacgggcgcccgcgtttttcaatgcgttgaagcaatgtcggcaggcttgcctttatgtatacaataacattcggtttcggcaagtcgtgagtgagcagatgataaatctgcttatatttctcaagcttttggccgtgcaatgtacgctctgcgaaaataacatttttataaatatgataatcggacaaaacgggctgtccttgttttaaataatctcggtcggtgtcttcaagctgtttatacctgtgacatagaaaaaacatttcaagctggaaactccactcctcgatattgtcataaaacttatcgagataagggttgtcttccacaatctcattaatcataggaaaaccgagctcttcagaaagcatcgtagcgagtgtcgtttttcctgccccgataggaccttctaccgcgataaaaggggctctgttcattgaaaatcctccttaattctgcaaacatccgtcagctgccggcctttatattgtatcacaatctcagaaaagcccatgaaaaaagacgcttccaattaacgaaacgtctcttttacaatatgaaattgatcgttgagcaaaagccagttttgcgggaaagagaggccgagtttccaatagctgattcctcttaaatgaagttctttaattaaattgaatttcgcttgaatggatcgtgcgtcttcaaaccatacttcatgccgtctctgattttcatccgtgtaacgaaagaatggagcctgggcggtttcgtcatattgaatgtcgactttatggcgtgctgccagagcgattgcctgctgaggactgacggctttcgctgtcgttccctgtttgaaaggcagtgtccaatcatagccgtacatattctggcccatgacgatttttgaagagggcatttctgtcagcgcatactcaatgacattccttacagggccgattggtgatacggcctgagccgggcccccgctgtatccccactcatatgtcatgatgacgacaaaatcgacgatttctccatgtgccctatagtcatgtgcttcataccatttgccggcctgggtcgcgctcgttttcggagcaagcgccgttgaaatcttccagccttgacggtgaaaaatggtcctcgcttcacgtaaaaaacgattgtaggcttctctgtcctgaggacgtaaatattcgaaatcaaaatgaatatcgcgaaagccgtgctgcttagccgtggagacgatttcctgaaagagttttgttttcacagtattatcattcaaaatgagccgcccgagatcatcgctgaatgcgtcattttcaaggttggtgatgatcatcatcagtgcggtgttgtgcctgtcactgatgcttcttaaattggtgagaggcggttcctttaaagtcccgttccgctgcacttgaaaactgaatgcgccgaggtatgttaaataaggagaggcctcccttgccgcctgctggagattagcgcttacgctcgttccccgcggttctatatatgcgtttgattcgatgtcgggcttattcgcctgctgcggaatgtaaaggcgggttccgactctcaatgtggtgctgggctgaattccgttcaccctcgcaagctccgcggccgatatatgaaaacggccggcgattgccgcgagagtatcaccttgtttcacttcgtaatattgaccctcaatcgggatgacaagggtttgtccgacaaccaatgtattcggattaggcagtttatttgcttctgcaatgacatttgcggctgtccggtagcgcgccgcaatagcggaaagtgtgtcgccccgtttcactatatagatctgaatgaaaaacgcctcctttcatatccgctatcaaatatatgaaaaaaggaggctgatcatgtttatttttcggcggtaatttgtttttccgtggttatttctgcgaagagaacattctccatcatcgtcaaagcgaaatcattgtcttcgtcgttattggaagcggtgcagtctttcggaatggtaatgctgtattctctcatataagcgtcgttggccgtgaacaacacacaaatgttcccggcaatccccgtgatgattaatcggttcacctgtaattcggtcagaagggtgtgaagcgccgtttcgtaaaaagcggaatgcttcggtttaatgagaaaataatcatccggctgaggcgaaatatcttttataatgggcgcgcttctgtcattgctgcattcctccctgatggcatcaatatcagccttccagagcccgtaatgatcattaatataaataatcggccagttgctttgttttgcatgcttctttaatgataaaatacgggggacaatttgtttggttttttcagcaagacgttcgcccatatcaaattgaaaattgttgatcatatcgacaatcagaagggctgtgttgttaggttcagacaataccggcaactcctttctgctggggtattcctattttaacctttatgagacatgaaaaaacttaagaagagagcttgaaccgatgaatgatgaatattatatgagagaagccataaaagaagcgaagaaagccgaagcgaaaggtgaagtgccgatcggagcagttcttgttctgcatgatgagattgtggcgcgggcgcataatctgcgggagactgaacagaggtcgcttgcccatgccgaaatgctggcgattgacgaagcgtgccgtaagctggggacatggagacttgaggatgccgttctttatgtcactttggagccgtgtccgatgtgcgcgggagccgtcgtgctttcgagagtcgataaggtcgtattcggcgcatttgatcccaaggggggctgtacaggaacgctgatgaatctcttgcaggaagagcggttcaaccaccaagcggaagtggtgagcggcgtgctcggagaagagtgcggagaaatgctcagcgcttttttcagaaagctgcgccggcaaaagaaagacatgaggaaaaagttgtctgagtagtaaggttgcattttctgcctgaagcagatatacttatgtgtgcatcatgaatggtgcgcatataaaaatttgatatttattttgccgtgctaagcggggaggtagcggtgccctgtacccgcaatccgctctagcggggccgaatcccttctcgaggttcgtttactgtaaggtctgccttaagtaagtggcgttgacgtctgggtcctgcgcaatgggaattcatgaaccatgtcaggtccggaaggaagcagcattaagtgaaacctctcatgtgccgcagggttgcctgggctgagctaactgcttaagtaacgcttagggtagcgaatcgacagaaggtgcacggtaaatcaatcatcaaatttcagactcacctgtttatggcaggtgagttttttcgtatatgaaaaacgggttttggcgttaaaagcacgttcatgtataataaacatgatgaataacagaggagggcgcatcctgtgggttaccaagctttatatcgagtatttaggcctcagcagtttgaagatgtggtcggacaggaacacattacgaaaacgctgcaaaatgcccttttgcaaaagaaattttctcatgcatatctgttttctggaccgcggggaacgggaaaaaccagtgcagctaaaatatttgcgaaagcagtcaactgtgagcacgcccccgtagaagaaccgtgcaatgaatgtgcggcgtgcaaggggatcacaaacggctctatatcagatgtgattgaaatagatgcggcgtcgaataacggcgtagacgaaatccgcgatatccgtgacaaagtaaaatttgccccgtcggccgtcacctacaaagtatatattatagatgaggtgcatatgctctctatcggcgcattcaatgcgcttctgaaaacgctggaagaaccgccggcacattgcattttcatattagctacgactgagcctcataagattcctttaaccattatctccagatgtcagcgttttgacttcaaacggattacatccaaagcaattgtcggacgaatgaagacaatcgtcgatgcagagcagctgaaggtggaagaaggagcccttgatatcatagcgagtgctgcggacggaggaatgagggacgcgctgagcctgctcgatcaagccgtatcattcagcggtgaggagctgtcggtggatgacgcattgctcattaccggagccgtttctcagcactatattgggaaacttgcatctgctcttcacagcaaacaggtttccgaggcattggaaacactgaatgaattgctccagcaggggaaagatgcggccaaactgattgaagatatgattttctatttcagggatatgctcttgtaccaggccgctcccggtttagaaggagtcctggagaaggtgaaggtcgatgaaacgttccggaatctgagcggtgatataccggcccccgctttatatgaaatgattgatatcctgaataaaagccatcaggaaatgaagtggacgaaccacccaagaatcttttttgaagtggctgtcgtgaaaatatgccagacggcacagcaatccgcgggagatatccctgaggtcggcatgctgatgaataagatccagcagcttgagcaggaagtggaaaggctgaaaacctccggtgtgaaggttcagatggaaagcgctccgaaagaagctccgcgtcctcaaaaaggcggaaaaagccattacaaagctccagtcggaagaattcatgagatattgaaggaagccacaagacctgatcttgaacagcttaaaagcagctggggcaagctgctggcacacctgaaacagcagaataaggtgtctcatgcggctcttttgaatgacagtgaaccggtggctgctgctcaaaaggcatttgtgcttaaatttaaatacgaaatccattgtaaaatggttgcagaagacaataacggagtccgtacgaatcttgaacagattctcgaatcaatgctcgggaaaagaatggatttgattggcgttccggaagcacaatggggtaaaataagagaagaatttttaaatgatcaccagcaggaaagtgaaggatcaaacgaaccggctgaagaagatccgctgattgcagaggcgaagaaacttgtcggagcggatttaatcgaaataaaagactaataagatgaaagagagtgattgaatatgcgtggcggaatgggaaacatgcaaaaaatgatgaaacaaatgcaaaaaatgcaaaaggatatggcgaaggctcaggaggagcttgctgaaaaagtgcttgaaggcacagcgggcggcggaatggtgactgtaaaagtcaacggccaaaaagaagttgtagacgttgccattaaagaagaagtcgttgatccggaagatatcgaaatgcttcaggacctgattcttgccgcaacaaacgacgccctcaaaaaagtggatgacatgacgaatgagacaatgggacaatttacaaaaggaatgaacataccgggtttattctagggggataaataaacatgcagtatcctgaaccaatatcaaagctgattgacagctttatgaaattgccagggatcggaccgaaaacagcggttcgtctggctttttttgttctaggtatgaaagaagacgtggtattagatttcgcgaaagcattagtaaatgcgaagcgcaacctgacatattgttcgatttgcggacatattacagatcaggacccttgttatatatgtgaggacacaagaagggataagtctgttatttgtgtcgtgcaggaccctaaggatgttatcgcaatggagaaaatgaaggaatataacggccagtatcatgttcttcacggcgcgatttcaccaatggacggcatcggcccggaggatattaagattccggagctgctgaaacgtcttcaggatgatcaagtgacagaagtcattctcgcaaccaaccctaatattgaaggggaagcaacagcgatgtatatatcaaggctgttaaagccctcaggcatcaagctctcccgtattgcccacggtctgcccgtcggcggtgatttggaatatgctgatgaggtcactctttcaaaagctcttgaaggaagacgtgaattgtaagggaggaaaaggcaaggcatgggttttcttcgcagaaatacattaagaaaagagtttgacgagaagctgatagaacagctctttaaacaaaaagaagaatggaacaggcagaagagtctggtcgagaaaagtctcgagccctccgctgaggtgttgtttgagctgaaagtcgctgaatctaaatactttttctatttaaaagaagcgaagcagcggaatttgaaaatgagcagatggaagtaaaaggtctattctccggggtcttctcataagcttgtactaaacaagcgagggggaagattcatggagccttttttcattatcggtttgattgtcggtctggttgctttgctttttttatggggagtatcttcaaaaccgctaagatggattggtgtgactgcgattaagtttattgccggcgcgattttgctggtgggtgtgaacttgttcggaggcagtctcggtattcatatccctgttaacctgattacaacgggcatcagcgggattctggggattcccggcatcgctgctttgatagtcattaaacgcttcatcatttaatttgtcgattattgttgacatgtcggattaagggtggtattctaatatacgtcgctgatgacgaaacgaatttttgaaaaagaaattttaaaaagttgttgacggcactaacactgatgtgttaagataattaagtcgcttcaagagcggtggacaaagttctttgaaaacta

SEQ ID NO: 68 - DNA, 31722 bp, Bacillus amyloliquefaciens
tgtctccgcccgtgatgacggcgacttttccttttaatctgcccgatccttttacatccgggtcctccaagagcggttttggctccatgtctgactcaatgccgggctggcggttttgcacctgcggcttttgtccttccgtctgtctgtccatcggattcatattctcacactcctgcaattggtattactgagacgataccacgcagtgcggggagttaaacggacaaatatgccggtaattaaagctgctgagccgtttcgggaaaagcgccggtgtatttcgcagacggcctgtaaatcatgttgtcagcggactgttcaagcacatgtgcgcaccagcctgccattctgcttgctgaaaaggtcggcgtaaataaatcattgtcgacatcaatggcctgcatcacagccgctgcgtaaaactccacattcgtatacagcttccgtccgggcttatattgctctaacaagcggatggcttccttctccacataaagcgccaagtcaagcgacggatcatttcccgtcacttcttcagcctttatgcgcagcgcttccgcccgcgggtcttttgttttgtacaccctgtgcccgaagcccatcaggcgttctcccctcataagcttcgctgtcaaatacgcttctgcattttctttttccccgatgtcttcaagcattttcgtgacgcctgaaggcgcacctccgtgcagcggccctttcatcgtacccagtgcggcagtgacggcagacactaagtccgattcagtcgaaacggtgactctcgccgaaaaagtcgatgcattcatcccgtgttccatcgccagaatcatatacgtctcaagcgctttcttttgggctgcggacggctgcctgcctgtcagcatatacaaatagttttcaacgtgtccgtatcgcgcctcgggtgacagcgcttcctgcccttgtttacggcggtatctgtacgcaataatcgtcggtgtgacggcaatcagtttaatcgcttcttcccgcttgggcggatatgtaaatgaatctgtgcccaaacccgaaacagccgttctcagcaccgccatgtcgtccatttcatccggaagcgtttccagtaagccgatcaaatgtttcggaagcccgcgctcggctgcaagttcttcctgaaacgcaagcaattgccgctcatcaggaagcgccccgttcaaaatgagatacgccgcttcttcaaaactgaattgcaatgcgatatccttcgcgtcatagccgcgatatattaaatgccccttttctccgtcaatgtggctgatcgccgtttctgcacaagtaatccctttcaatccacgataaatcaatttcattcccccttatcctctttctgttattatagtaaatataatatttaaaaaataatgaatatttttaagggaattaattaaaacttttaatcagaggagtgcatctatggattttaaatggcttcacaccttcgtcaccgcggcaaaatatgagaatttcagaaaaacggcggaaacgctttttttatctcagccgaccgtcaccgttcatataaaattattagagaaagaaatcagctgcaagctgtttcagcggagcggccggaaaatacaattgacggaagaaggaaaagcatacgtgccgtttgccatgagacttttggaagactatgaaaacagcatggcggagctgcacagggtgcgccagggctactcgcacacgctgacgctcgctgtttcgccgcttatcgccgacaccgttcttccgtctgtcatgaagcgttatacagaggacaataaagaaaccgaaatgacagtcaccattttcgaatcggaagaaatcgcctctcaaatcagaaacggctcagccgatatcggactgagctgcttaaaggtgcaatcatcttccctcacttgccgccccctgtacaatgaccccgttgtcctcgtcgcgccacccggccgaaaacccgggacagggaaggcgaatgaagtgaaagacctgttcggacaatatctgcttttgacccataaccatcctgactattgggatgatttgctccgccaggtcagaatacagttccctttcgtcagaacaatgaaggtgacacagacgcatattacgaaacgatttattaaagaggggctgggcgtctcatttctgccgctgtcagcggtacggtccgaactcgccgcaggcagcatgattgaaattccgtgcgaattcgcccagatgccgagcgcgggcgcgtacgccatcgccctctatgaaaatgaaaaaaagaaaacctttttagattttttatcacattttcatttttaggtgaaacaaatggagctctgccccgtctaaataaaaaacccgttcggatgaacgggtttctctcactgctagaatcttttcgcgcccaggtagcgcggcttccagtagctgttattcagatcacttgttgtgacgccgtcagaaccggcatggatgaacttgttgtttccgatgtacacacccatgtgtgaagggccggcctgatatgttgtaaagaagacgaagtctcctcttgacgggctggacacgctcttcattgagctccagtatcccgcagtgcttgttctgccgacactcgtctgtttgtttaacaggtaccagataaatccgctgcagtcaaagccggaagtcgttgttccgccccatacatacggcgtgccgattaaagattgcgcatcagaaatcagcttgtttacattcaggctcgtctgtgcaatattatggctggatgaaggcttctttgatgacgaagatcctgaagacgctgaaccggaagttgatccttttactttaagcacttgcccgatgcggatcaggtccgtttttaaaccgtttaaactttttaattggtttaccgtcattttatatttattcgcaattttccaaaggctgtcgccttttacgactttatatgtagacgatgatgacttgctgcccgaatttgaacctgaagatgatttaccgttaatcgaaagcgtctgaccgatgtaaatgatatccgattttaatttgttctcagatttaatggaattaattgacgttccataccgatttgaaagtccccataatgtatcgcctttttttaccttaatcgtttgcgcagatgccgcacccgcaaacaaagtcgtccccaaaaccactgccgttgttgctgtaacaagttgctttttcatattttcctccctgaatgattctatctattttatgtgtctcttttttaaagtttttatctgtttcctattataaggttcaatttccactagaaatagacttgacttcccgtgacaaatttcttactaattcgttttagaaaaaagtttttaagggtattaaatatttcaatttgatttcaaacgtgacgaaaaacgagtcaatttgtcatgtttttttcctgtgatcatcgtattttggaaaaacaaagcagtttactttccaaataactccttgttaaaaaaatcctcatctttttcaaaaaagtgaatggttttcactctttcttgaaaacataagttacaccggaatttacatttctaacaatgtttcacctgaaatttacaggagaaacagacgctctttacaaacaccccctaccattagacatacagacacgattaaaggaggacgagtgagaatgagtctatttaaacaggttcgatcaaaacttctgccggcggcagccgtatccgtactgacagccggtctgattgcgggtgcggggcttcagcactccgaacaggctgcggcaaaaaaacagcctgacaaaaacgagatcagaaacgtcatcttcatggtcggcgacggaatgggcgctccctatatgaacgcctaccgttcggtcattaacaaaggaaagccttcggatggtatgaaactgacagcattcgatcccaatctcaccggtatgatgatgacttatcctgacgatcctgattccaatattaccgattccgcggcggctggcacggcaatggccacaggcgtgaaaacgtataacgcggcgatcggagtcgataaaaaaggaaagcgggtaaaatccgtcctcgaagaagcgaaacaaagagggaaatccaccggacttgtcgcaacttcggagattgcgcacgccacccctgcggcattcggagcccataacaaatcccgaaagaacatggatgacatcgcaagcagctactttgatgaccgcatcaacggaaaacagaaagtcgatgtgctcctcggaggcggcaagtcaaactttatccgtaaagaccgcaatataacaaaggatttcaaaaaagcgggatacagctacgtgacatcaaaacaggagctcaaaaaggatcgtaacaagaagattctcggcctgtttgccgatggcggactcgacaaagcaatcgaccgctcaaacgccgtcccttcattagaagacatgacaacggcagcgatcgacaggctgaacaagaataaaaaagggtttttcttaatggtcgaaggcagccaaattgactgggcgggccatgacaatgatatagtcggcgcaatgagtgaaatgaaggattttgaaaaagcgtataaagcagcgatcgcatttgccaaaaaggacaaacatacgcttgtcgttgccacggctgaccataccaccggcggattgacgatcggcgcgaatgacgataaaaactggcatgttgaaccgattcttgccgcaaaaaaaaccccggcgtttatggctgaccaaatcaaagcgggtaaatccgtatcttccgtgcttgcgcgttatacagacctgaaatggtcaaaagctgaaatcaaacagatcgaaacggcctcaaaacaggatgctgacaagagcgtctacaaagcgatcattaagctctttaatgcgaaaaccaacagcggctggacaaccggcgatcatacgggcgaagaagttcccgtttacgcatacggtccgggaagagagtcatttacggggcttttaaacaacacggaccaggccaaaaagatttttcacatcctgaaacacggaaaataaaaaaggatgcgggggtttccccgcatcctttcttcttttacagatatctccggtgcactcctttgccgtcataagaaaacatcacttctctgtcttcaagaacagattcgatgtgcacgctcctgccccacagctggtacagatacggcagcactttctccaaatatttcagatcaagctcaattccctcataccaatgtttaatataaagctcattattcttcaggtaatccccgtcattgacggtcagataaggaaatcccccgttgacccgcatgttcacgagctgatctcgcacggccttccattctttgtcgatcactttatagtccctgccctgcttttggaataaatacaaatcctcacgcattacgagatctttcgtcaaataattgcggataaatgatatatccgattcaatttccctgacctcaaacattttctcgcggccggaaccgggctttactcctgtttttttcatttcatctgtcgggttgtcataacgctcttcgatgtcctcaaaaattttcagccctaaataatacgggttgattcccgtttttgacggctgaacgacgcctgcgttcagcttcgcaaattcgatggcttcatctgaagtcaggtcaagctcgcggataatccgctgatgccaataagatgcccagccttcgttcatgattttcgtttccagctgcggccagaaatacagcatttcttctctcatcatggttaaaatgtcacgctgccacggttcaagctcccgcgaatgttcttcgataaacagcagaatatctttttccggccggggcggaaacggttttttcccttttttctttttcacctgcttcggcttatccattccccataaatcatcgtaaggcgatggcgcggtttcttcttcgtcctcctcttcgtcatcgacgctccacagcagcttcggcctgacgagcgacggatcgatatgctcctgaaccgccagaatggcatctaaaaaggactccacctcttttatcccgtgaattctttcataatgcttaatccgctccgccgcagccgccatactctcaaccatgtcccggttcgtattttgaaagcggcagttatgtttgaaaaaatcacaatgggcaagaacatgggctacaattaatttattttggatcagcgaattgctgtccagcaaaaaagcgtagcaagggttggaattaatgacaagttcataaattttgctcaaaccgagatcataatggagtttcatcttatgaaattgtttgccgaaactccagtggctgaatctcgtcggcatgccgtacgcgccgaatgtataaataatttcagccgggcaaatttcatatctcatcgggtagaaatcaaggccgaaacccttcgcaatgtcggttatttcctcaattgcccgctgtaaaccttttgtctcctccgcgttcaaccgaatcccccctacttggacttatttataatgtatgacccctcctctcaaaagatgaaataacagatcggtttccggctgaaaactttcggcacatccgcgccgtttgctttatctgtaagtgggtaaaacacacaccataccccaaaaagaaaaggagcgattctacttgaatacagcagacatgcttacgacgtatctcagcaaactcccgaatctggtcattgcactgctcgtcctgcttatcggctggggcattgccaaaatcattgaaaaagccgtatacaaaggcctgcaaaaaacaaaaattgacgacaggctgttcgccgaaaaaaagccggcgcgctattcctcagaaaaagtcatcagtaaagtcatttattttatcgcattaattatcgtttttattctattctttaacattctgcatctgacaaccgtggcttcgccttttgtcagcatgctgtcagcgataacggcggctgtgccgagcattttaaaagccggcctgattctgctgttgggctgggcggccgcttcgcttttcagctatctcgtcaaaaaagcgggcatgaaactcgctgaaaacggccggttcagaaaatggacaatggtgtctgaagaagcggagatgagcagatccgttacggccgcttcacgaatcgttttctacttcgtcttgctcttgttcctgcccggcgtcttggccgctctccaaatcagcggagtatcagggccgtttacaaatatgatccaaagcgttttgtcctttataccgaaagtattcgccgcggcgctgattgttttaatcggctggcttgttgcccgtctcgtccgtgatatcgtcacaaactttctggcgagtatcggcacggaaaggctcgccgcacgtatggggctttctatttatctgaaggatacaagcctgtcggcaatcatcggaacgattgtctacgtgctgattttcattccggtgatcatttctgcgcttgaccggcttgatgtggcgggtatttctgaaccggcgtcagccatgctgcacacggtctttacaatgcttcctaatatcatcatcggtatcgtgctgatcatcgccggcatctggatcggaaaatgggtcaacagcattgtatccgggctcttgcaccgggccggtttcgactctcttctcggtaaaatgggctttgaacaggcgggtaccccgaagctgacgctttctcagacggtcggcatgattgttcagatcatcatcgtcctgctctttacggcagaggcgctgcagcttgttcatctcgaatttctcgtcgttatcgcaacaggtattatcgcttacctgcctaatgttctggccgctgtatttattctcggaatcgggcttttggccggacagctcgtcagcaggctgcttgccggcatgctgagcggaaaggaattcagattcctggcgccgcttgcgaaatataccattatcactctctcaatctttatggcgctggatcagctcggtgtcgccgacacgatcgtaaatgccgcgtttattctgattctgggcggtttcgcgcttgccttcggactttcattcggtcttggcggaaaagaatttgcctcccgttatctcgcaaaattggatcgcaaaattgaaaaacatcaatcggctgacgatcgtaagccgccgatgtcttaacgaaaaaaacgtgtgctcagaaggagcgcacgtttttttttgagttaaaggggcaaattccttttttttcattttagattcatatatgatagactgtaacagaagcaaaatctctttttccgaggtcattctatgaaattaacgaactataccgattattctttacgcgttttgatttttttggcttccaaacattccgacgaactttccaacataaaagaaatcgcagatacttattccatctctaaaaaccacctcatgaaagtcatttaccgcctcggccagctcgggtatgtcgaaacgatccggggccggggaggcggaatccgattaggaatgacaccggaagacataaacattggagaagtcgttcgaaatacagaagacgactttaacatcgtagaatgctttgactccaaaaaaaatctctgtatcatatctcccgcctgcaacttaaagaaccttctgaatgaagccctgcaagcttacctggccgttttagacaaatatacgttaagggatctggtcaaaaacaaagaggagattatgagactgctcagaagctgaaggaatgtccgcattccttcttttttttatgccggcataagaaaaaaggactatttctattaatatgataaacgattgcagacaagtgccgatataaagattatcattactgatatcctcaccttgcggctgcaacgaatggggatagtaaaatcatcgcaggaaaagggagattcattatgaaaaaaaaggtagcggtcggtttgactgcatctgcgatcgtcgggtctgcgttagctgtaacaccggcagaagcacaaacgattaaggttaaaagcggagattcattatggaagcttgcccaaaactacaatacaagcgtggatgccattacatcagcgaatcatctaaaatccaccgttatttctatcgggcagacgctcaacattcctaacggcaaatcagattccggcagctcaaagccatcttcaaagaacagcggcacgactaaaagcgtttatacagtgaaaagcggagactcgctgtggctgatcgcatctgattttaaaatgtctgtacaggaactgaaaaaaatgaacggtctgacaagcgacttaatccgcgccggacagaagctgcaagtgacggggaaagtttcctcaagcaccgatcagaaaaaaaacacaccgggcagcagctcaaacagcagcaaaaagcagtcatcatcttccgggacgtataaagtcaaactcggcgattcactatggaagatcgcaaacagcgtcaatatgaccattgcggaactcaaagtattaaacaacttaaaaacggatacgatctacgtaaaccaagtcctgaaaacaaaaggaacgtcttcttcgggaaacacgccgtcaaaagacaattcaaaccaaaataaaaaccagacgcaaacgtcctcttatacagtaaaaagcggagactcactctggaaaatcgcaaacgcatacaacatgacggttcagcaaatcagaagcatcaacaaactgacgtcagacatgctgcgggtcggacaagtgcttaagctgacaaaaacgtcatcttccggctcttcgacttcaccgtcaactccgaaccagtccggagatacagggaaaaccactacatataccgtgaaaagcggggattctttatgggtgatcgcccaaaagttcaatgtgacggcccagcagatccgcgagaaaaacaatctgaaaacagatgttcttcaaatcggacaaaagctgacgattaccgggcagcagacaaacacgacaccgaatcagtccggcaacacaggcggcacaggttcaacaagcgcgaagattaatgtaatgatcgatgccgcaaaagctcaactgggcgtaccgtatgtatggggcgggacaacgccgagaggctttgactgcagcggtttcatttattacgttctcaataaggtcacttctgtatccagactttcagccgcaggctactggaatacgatgacatcagtcagccagccggcggtcggtgactttgtctttttctcaacttataaagccggaccttcccacgtcggtatttatctcgggaacggccagtttattaatgccaacgattcgggtgtcgttatttccagcatgaacaattcctattggaaacagcgctacctcggcgcaaaacgtttcttctgatatctgacaagctgtacggcctcaattaggctgtgcagctttttttacagtctgaaaatattaatgctgatcacgtgttttgttacgggatggaaatacacttcagcacgggatgaaaacgtttcttttgatgtttgcaccgttacgcgaaacacatctttcgtctgttcccggttcacttttgtacggcccatgtacgaataatcggtaagctcggcccccttgtattcacgttcaagctggttccatgcgagctgctcccatttttcaactgatggatcaaggtgttctgtatgccctttttcagcgatagaggcaatgagaatgccgcaaaacaagagggcaagcgcaaatggaagggatttcatctttatgttctcctgagtcgttttttgtcaatcttagcgtgtccaaagaagagacggatatgcggttttattttatgtctccctcatattgctatgccgcagtgataaggacaccaacttttcccccgttgcatccgggcttcagcggcataaactaacggagaacttctcattgaaaggagaagcgttagatggatcatgccgattatgacaaagccttgtattacacacaccggtctcaatgggacaatttgttaatattgatggttcgtacaaaagatgatttattatcaaagcgtattgagcactttctgcacgcgtatcatttcgaatatgatcatgcggtgcttgaaaaagagctgtattctcttctcgggtatattgatcatgcggcggagctcgtttatgaagatcaattagccatgctgacataaaaacaatcccggcgtcagacgccgggatttcttgtatttgtgaacatattcagctcttcgatcatctctttcaggctgaccgccatatcctcagatacggtccggcgctccatgtcaatgtgaatcgggtctaagaccagctgtttcgggatgacatttgcataaacgccccgcatgaccgtccgcatattcgccagcgcgttcatgcctccttttcctccgcccgccgcggcaatgattgccaccggtttgtatgcccagtgatcgctgcttaaaaaatcgatggcgttttttaaagcgccgctcatgccgctgtgatactcgggagataataagacgacggccgccgactttttcacctgccgccttaactcttgcactgaaggcagctcgttctgttcttcttcaccgttataaagcggcagatcactttcgctcaaatcaatataatcggtatgaaaccgatctctgatataagaagcggcaattctcgtccgcccgttttttctcggtgtgccgctgatcactaatatgctcatgattttaccgcctttccaaaaacattatattttaccgcatacaatgccgcctgcgtccgatcggaaagattcagctttgacagcaggttggacacgtgggtcttcactgttttttctgaaataaacagtgccgccgcaatttccttattgctttttcctttggctatttcttgaagaacatctttttcacgaggggtcaggtgataatatttttccttatcctgatcatcctgaaccatgtgggtcagcacatgaggcacaatatccgccgacagccggtaacgtccggaatacacttcccggagcgttttcactaaatcatcgggctgggcgtctttcagctgatacgcttttgcgccggctttaagggcgggaatgacatgctcctgatcagaatagctcgtcaaaacgacgatactgatgtccggaaatcgttcagccgcaatttttgccgcttctatgccgtccgtatcaggcattgataaatccatcagaatgatgtccggctccgtcttttcagcttgctgaagcgcttcagcaccggtggacgcctcaccgacaacttcaatgtcttcctgagtggcgaagaaatagcgcagtcctttgcggacaacgtgatgatcatcagcaatcacaattttcatcaatcagacctcctgtcccgaaacggaagccgaacggagacaatcgttccggcgccaagctcggattgcaatgtaaagcggcctccgatcgcttcagcccgcgctttcatgccggccacgccgagcgatgggagcacagcatgcgcatcagcgctgaagcctgctccgcggtcgctaatgtgaagctcggcgcaatccggctttttaacggcggaaatgataacccggtccgttcccgcatgctttttacagttattcaaggcttcctgggcgatccgccaaagcgcgtgttcctgttcatccgtaagctccagctcatcctccatttcacaaacggcttccagaccgataagagcggtatagcttttgatcgacgcatacagccctttcgtcaaactttccggcttcagctgccaaataagcgccctcatttctgttagcgcatcctgagacagctcttgaataaatgtaatcatctgccggagccgatcatcatttgtaaaactctttgcggcttttgccgttaagctgacagaaaacagcatctgattgacggaatcatgtagctcttgcgcaagtctgcttcgttccatcaacagggcgttctgctgctcaaattcggccaatttcatccgctgaatcgccgttccgatttgaaatgcaacagcttcaagaagatgcagttcttcttcgttgaaaaatgtcttttcgtttgcggcgacgtttaataaaccgaacttccggccgccgtcctcaagcggtacggtcgcatgatgggtaatgccctccgtatcgcggcagttcgtcgtctgttccgcaaattcaatccgtttacaattcattatgtttacggcctttgtcaaacccccattgctgaatttggtcagacaatagcattccccgctgcacatgagtgcattttcccgctgaccgagagccggcggtaaataagcggatgcggcgagcgtataagacccgtccggctcaatcagaaaaatccaccctgtctgcagcccggtcaggctgagcagttcgcggagcactttatcaagcgcttcctttaaatcgtggttttggtttaaggtttccgcaatcgcttttaacgtttttaacgtttctaccgtcgttttcgtcaatttccctcactccggccaatcagaattatccatattatatcaattcttttctgtatattcctttgttttcagcatgaattttcctcatactttcggatgaggcgtataaaaaaaccgccggatgtcgcttccggcggtttgttgtttatttcgttttttccactatgccatccaccgttttcatgacggcttcagataatgcggcaagacgctgttcgctgtcttgtaaagaagttcccttcacggcgaaatagaacttcactttcggctccgttcctgatggacgaaggcagaaccaagagccgtcttcaaggaaatatttcaggacatttgacttcggcagatcaatatcttcttcatgatgatcggcaaatacagtccgttttcccgttgaatagtcttcagcctgagtgatttgttttccggccatctgcttcggcggatcgtttcggaatgaagtcaggatagcggaaatctgctctgctccctgttttccttttaacgtcaatgacttcaagccttcacggtaatatccgtattctttaaaaatggacagcagcgcgtcataaagcgacatgccctgctttttataaaaggcgcatacctcgacggctaacagcgcagcctggatcgcgtctttgtcacgcgcgaaatcgccgattaagtagccgtagctttcttcatacccgaactggaacgtgtattggcctgatttttcatattctttgatcttttcaccgataaatttgaagcctgtcagcgtgtcaaccgtatctaatccgaaagatgaagcgacggcgcggcccaattcgctcgtgacaatcgttttcatgacgacaccgtttttaggaagggtgccctgttttttcttctcggaaagcaggtaatgcaataaaagcgcgcctgtctggtttcccgtcagcactgtgtacttgccttcgctgttttttacggcaatgccgagacggtcggcatccgggtccgtagcgacaagaatatcggcattttgttcttctccgagcttaatggcatattcgaatgccgcgtgctcttccggattcggcgatttgacggttgaaaaatccgggtccggcagctcttgctcctttacgacggtgacgtttttgtaaccgagtgcttcaagaccgcggcgcaccggtttatttgccgtgccgtgaaggggagtgaacacgacgctgacatccacttcatccgaaagctcgggatgtacggagatggaagtcagtttttcagtatacggtttatcaatttcttcaccgattattttaatcaaacctttttctttcagcgactgttcatcttcaacttgaatcgttaattcattttctatggcattcacttccgcaatgacgatgtccgcttctttcggcggcagctgtgcgccgtcatcgccatacactttatatccgttatattcaggcgggttatggctggccgtcacgacgatgccggcataagcgttcagctttctcaccgcaaaagacagctcaggcgtcgggcggagctcatcaaatacgtatgtttgaatgccttgggaagcaagggtttttgcagcttccatcgcaaactcaggagatttatgacgggagtcgtatgcgatcgcaacccctctttttttcgcgtcttccccctgtttcgcgatatacgccgcaagtccggcggatgctttgcggaccgtgtaaatgttcattctgttcgtacccggcccgatttctcctctcatgcctcctgttccgaactcaagatttttgtagaaaaaatcttccagcaactgctcgtttccttctgcgtccgccaataattttttcaattctgaatctaattgttcggcctgattccagcgttcgtaactcttactccaactcatgttcgtcctcctataatttcagcttatgaccatattttaatatgaagcggctgcccgtgtcacttgataacttaaccaaatgctttatgtaaaaagataaaagaagggctcatgccttttcggcacagccctccggttattattgttcgagcggaacaaccgcgtcgtgcagcagcatatttaaccactcagtgtgtttttctttcgtttcgtcattccattggaatcggtcgctcatgtaatcaatcacggccgttttatacgtttgcacccatttgatgtcgaagaacagtcttcccgttctgcggacgaagaaatcggcaggtgtcgcagccatttcttcttcgatgctgtaagccgcttccgccagaatgtgaaccggaatctggcgtttttccgcttcatctttcaggccttcaatccggctgaatacattttcaacgttagagccgtatctgatggctaactgcttagcggtttcctgtgataaaccgattttcaagccgtcttttgtctttgcttccacaaatgactcgaagtttttagagccgccgacatgtccgccggaaatcggcatcgtcttcgtcttgcagccgccgaagtcctggccgccctcttctttcaagcggtcgcggacaagatcgacaatgtgctcagccattttacggtagcccgtcagttttcctccggcgatcgtaatcaggcctgattgagatgtccagatttcatctttacgggagatctcagacgggtctttcccttcttcgtgaataagcggtctgaggccggcccagctagattcaatatcgtccgccgtaatgttcagttccgggaacatataattgatggagctgacgatataatcgcgatcctgcaccgtcatgcgcgggtgctcaagtttttgtttgtaaaccgtatcggtcgtacccacatatgtttttccttcacgcggaatggcgaacaccatccggccgtccggcgtatcaaagtacaccgcctgtttaagcgggaatacggattggtcgaatacgagatggaccccttttgtgtgctggagatgttttccgcttttgctgtggtctttttctctcagctcgtcgacccacggacctgtcgcattgacgatttttttggcgtacactttgtattccttgcctgacagcagatcttcaattaaaacgccgacaacttttcctttttcataaagcagttctttcactttagaatagttgacaggctcagcaccgaatttaacggcttctttcatgacttcaatcgtcagtctcgcatcgtccgtccggtactctacataatagcctccgccttttaagccgtcttttttgacgagcggctctttttgcagtgtttctttagcagacagcatgcttctgcgctctgatttttttactcccgctaaatagtcatacacacgcaggccgattgaagtagagaatgaaccgaacgtgccgcctttatgaaacggcagcagcatccattccggcgtcgtgacgtgcgggccgttttcgtacacgatggcgcgttccttaccgacttcagccaccattttgacttcaaattgcttcagataacgcaaaccgccgtgaacaagctttgtggatcggcttgatgtgccggccgcgaaatcctgcatttcgctcaaagcgactttcattccccttgaagcagcgtcaagcgccgtaccggcacccgtaatacctccgcctataataaacagatcgtatgtttttttagtcatgtcttccagcatatgatcccgttccaaacttgaaaattggtgattcatcattacgcttcctccttgttgtcacggtatagaaaaagagaccacaacagccaaagcgcatgtcgtcactttggtgctgtggtctctcctcatctcaggaccgttcctattaacttgttttcagtataccataattttatcttatttaaaagccatagctgcatttactgcttttttccatccgccgtacaattcatcgcgtttttcatcttccatttccggtttgaattgcttatcaaggttccactgatcggcgatttcagtgctgtccttccagtagccgacagcgattccggctaaatacgcggcaccgagcgccgtcgtttcattaatttccggacgttcgaccggcacatcaagcaagtcgctctggaactgcatgaggaagttattttttaccgctccgccgtctacacgcaatgtttttaaagagatgcctgaatcagcctccatggcatcaagcacatctttcgcctgatatgcgagagattcaagcgtggcacggataaaatgctccttcgtcgttccgcgtgtcaggccgaaaactgagccgcgcacgtcactgtcccagtacggtgtgcccaatccgacgaaagcgggcacgacataaacaccgtcagcggaatccacacgctctgcgtatgtctcgctttctttcgaatcctggaacatccgcatgccgtctctcagccattggatggcagaacctgcgacaaagatgcttccttccaatgcatactcgacttttccgtctaatccccaggcgattgtcgtcagaaggccgtgatcagaagtgatggctttttctccggtattcatcagcataaagcagcctgtgccgtatgtgtttttccccatgccttcttcaaagcacgcctgaccgaacagcgcagactgctggtctccggccgctcccgcaatcggaatatttttaccaaagaaatgataatcaaccgttttcgcgtacacatgagaagacggtttcacttccggcagcattgatttcggtacgcctaaaatatcaagcagctcgtcatcccattttaattcatgtatattaaacatcagcgttcttgaagcgttggaataatccgttacgtgcgccgcccctccggacattttccagatgagccatgaatcaatcgttccgaacagaagatttccgttttccgctttttcccgcgcgccttctacattgtcaagaatccatttgactttcgttcctgagaaataagggtcgatcaaaagtcccgttttttctctgaatgtatcattatatcctttttcacgaagctcttcgcaaatgctggatgtttgtctcgattgccacacaattgcattgtataccggctttccggtatctttatcccatacgaccgtcgtttccctttggttcgtgatgccgatgccggcaatttgatcagcgctgattccggactcggagatcacagtcgcgataacggcgagcaccgatccccagatttcgttcgcattgtgctccacccagcccggctgagggaaatgctgtgtgaattccttttgagcggaatgcacgatttttccttctttattaaaaagaatcgctcttgaacttgttgtgccttggtcaattgataaaatataggtctccatgatgccgctctcctttttaaatatattcagaatttgataatgttttctgtgattgagatttcttggtataaatatagagtatgaaaagcactacaaccattataacgcttacaaaccaaaagctaggtgtcacatttcctttaaacgcggcattgtaaaatacgccgccgaacgcaccgcccatgatcggaccgactacgggaatccaggcatatttccaatttgacggcccttttttcggaatcggcagaaaggcgtgagcgattctcggccccaaatcccgcgcagggttgatcgcatatccggtcgtccctccaagagaaatcccgatggcaacgatgaggaatccgacaatcagcgggttcagcccttttgtaaattcattcgctccgattgccaaaatgccgagcacaagcacaaacgtaccaatgacttcacttatcatattcccaaatgtatgaggaatactcgggccggtcgagaaaacgcccagtttggcggccggatcatccgtcgccttccaatgcggcagataatgaaggaacacaacaaccgcaccgatcattgctccgatcatctgtcctgcaatataaacagggacctctttccaaggaaagctgccttcaagcgcaaggcctatcgttaaagccggattcaagtgggcgccgctgatgctgccgacggcatatgccgccatggctactcccaatccccagccgaatacaataacaatccatccggattggtatgaaagcgatttctttaaattgactcccgcacaaacgccgccgccgaaaataacaagcagcattgtaccgattacttctccccaaaatgctgtcatcatcattcctcctaaatgacaaaatagcaggtttgacagagttatagagaataaaaaacccacaacaaaccgctttacgctttattgcttccgtaaagagctgttgtgggtctccggatctccatcacatagtattaacctaggtctattgtaacaatgggtgtaagcggtgtcaatctttttttgtcatagaatgttcatatttagcccatagttcggtgtctgaagtcgtcacggccgtggctcctgcctgcaaggcgttttcaacgtcctgctccgtgcggatgaagccgccggcaaaaataggaatccccgtcatttctttaatttctctgattaaagtcggaacaatgcccgggagaacctcgataaagtcaggtttatgctttccgacgaattccatgcttttctccatggcgctcgtatccaagagaaatagacgctggatcgcgtatattttcttttgtttcgctttgacgatgactgatgatctcgtcgaaatgatgcccgcgggtctgatgtcctgacaaatgaactccgcaccgtattcgtcatgcttaatgccgtgaattaaatcgacgtgaaccatcagaagttttccgtgtttttttgcttcattcacgacaccttttaattgaccaaggtggatatctaaaatgacgccgtataagaacggactctctaaaaatgcatcgaattgcttcatgttccggatagccggtagaatctgctggttgtgaaaactcatgttttactcctttacattaaaaatcaatgctcagcacgctttccttgacggtcgaaatgatgaaagagagctcctcgtccgacaggcaaaaaggcggagacagctgaatgacattattatatcccgctacagtatcaccatttttcccgacaagcaggcctttttctctgcacgcggtgatgacgtgctgcacaagggcggcatcagcgggttccttcgtgattttgtccttgacgagctcaatgccggtaagaaggcccttgcctcgtacatctccgaccgccggatgttctctgagcggctcaagctcacggagcagcctttctccaagctcccgggagcgggcgatcagatgttcgtcctccatcaattgcaggtttttcaaagccagggcgcaggctgccggattgcctccgaatgtattcacgtgccggaagcggccgtacggctcaccgcccgaatacgcctcaaaaatctcccgttttaccgccgttgccgacagcggcagataagcgctcgtaatgccttttgccattgtgacgatgtccggtgaaacgccgtaatgctgaaatccgaacggctctcccgtgcggccgaaaccgcaaatgacttcatcactgatcagaagcgcgccgtggcggcggcaaatgtcctctacctttgccatatacccgtccgggggcatcagtatccctccgcctgtaataatcggttccataatcacgccggcaatcgtttcgcttaattcccacgtcatgatccggtcgatttcatgcgcgctttccaatgtgacggcatcgccgggattccgatagagatcaggcggcgccgcgtgcaaaaaaccttgtgagagcggctcatatttatattttctctgcgcctggcccgtagcggcgagcgcccccatcgtattgccgtgatagcctctgtaccgggagatgaatttgaagcggctgtgatcgccgttttcaatgtggtattggcgggcaattttgaacgcggtttcatttgcttccgatccgctgttggaaaagaagatcacataatcgccgccgagccattcattcagtttttccgcaagctcaatcgcaggttgatggctttgggtcagcggataataaggaagctccttcaattggctgtaagccgcatcggcaagctcctttctcccgtatccgatattgacgcaccacaggcctgacatgccgtccaaataccgtctgccgtcaatatccgtaacccaggcgccttcccctttttggacgattatgctgtcatccggctccgcccctttcatcgcgtgccaaatcagctctttatccttttgtttgagtgactgatttttttgtacatgttccacaccgctcatctccctttcaatatcattgcactgtatcgaaagctgcccggcttctgacgccgattctcttggtgaagtttttctcttaataagaatataaaggcgcggcatgggcgagtcaataaagcggcggcaattaaaaaaacgctttctcccagaaagcgaaagggctacaagagcatatcccgaaaccggggccggtgcaagtgtttttataaaaaaacccgccccttaagcggagcgggcgttttttatttcagatgcgtaatccggtaaatatctttgcgccggtctttcagctggcgcacggttccgttctcacgctgccttcttaagatttcaaggtccacgtccccgatcacgaccatttcgatattcggattcgtttcaccgacgattccgtctctggcaaattcaaaatcagacggagcaaaaatggctgactgcgcgtattgaatatccatattttctgtttgcggcaggtttccgaccgtacctgagatgacggtgtaaatttggttttcaaccgctcgcgcctgagagcagtaccttacgcgcaagtagccttggcggtcttcagtgcagaacggcgtaaagataattttcgccccttgatcggcggcaattctcgcaagctccggaaattcgatatcgtaacagatctgaatggcgatctttccgcagtccgtatcaaatacgcgcaccctgtctccggcgctgatgccccaccatttccgctcattcggcgtaatgtgaagcttatattgtttttcaatcgtgccgtcacgtctgaataagtaggcgatgttataaattttcccctcttcttcaacgaagtgggagccgccgatgatgttgacattatatttcaccgcgagatctgtaaagaggctgatatagtcctcggtatattcggtaatcctctgaatggccagactaggagaacgctcctcgagaaatgacatcagctgcgttgtgaaaatctccggaaataccgcgaaatcagatctcgcatcggaagccacatcgacataatattcaacctgattggcaaattcctcgaaggagtaaatctttttcatttcatattgaatgacacagatgcgcaccggaaatgccgatttgtaataacgctttgactgcggcaggtaatcgacattgttccattgcattaatgtcgcatatttaatggacgcggtgtcatccgggagataattcggattgatccgcatgagcgtaaatccgttcatcagctggaaagaaagcaccggatcataaatctgatggcgcgtcacctgttcgacataggctctcgccgtcatttcttccgcatacttatgataattcgggatccgcccgccgataatgatgcttttcagattcaatcgtctcgccaagtcttttctcgcctcatacagccggtgtccgattttcatccgtctgtattccgggtgaaccattacctcaatcccgtacagattcaatccgtcggggttgtggttcgtgatataaccgtcgtctgtaatgtcctgccacgtgtggcggtcatcatattcatcgaaattgatgatcaggcttgagcatgaaccgataatttccccttcatactccgcgcaaaactgaccttccggaaagtgcgcgagatggctgattaaatgctcaggctcccacggctccatccccgggaaacaatccttttgcagctcaataattttgttaatatctttctcttccatattccgtatgaccattttcttttcaaaacgggtcagatcaagtttctcagacaatgctgcttccccctgccggttcgttttgatcgttcaatcgctgtaagagtaattcaagttccatttccgccatcgattccagtctgtgatcgtattcttcaaataacagggcgcttgttaccttattcgggacgatgacacatttcatgccggcccgtttagctgcgattgagccgttgaccgaatcctcaaaggccagacattcagatggttcaacgcctaaatgttccgcagctttcagatagagctccggattcggcttcacttcttctacgtcgtcagccgtctgaatcacttcaaattcatcaaacaggcctaattccttcagatggcccgacacccatttaaaatctgagctggaagcgagccccaccttcaatcctaattcttttgccgcggctaaataagcctccaccccgggacgcgccgtttccgtcttcatccgctgttcgaagcgcccgcgcctgatcgccgtcagttcatcatgatcgagctttcttcccagctgctcctctaaatatgcgaacggcttaaaccccgcggccgttccgatcacctttccccagacggataaaggcaatgttgaaccgtgttcttcaaacatttcctgcagcacttcatattcatgggtttctgtatctaaaattaacccgtcaaaatcaaagattaatgcttttatcaatggttacagctcctttagctaaacgtactgacctatgtatacactataccgtgaatttctttcgcgttcaaaatgtaacattctgacggaaagaagagcctgcatgagtgcaagctctcttcatccgttactgtgtgttttgactggaaatattggaaagagctgctcccgcagactcatttgaacgctgatcgaccgctaagtctccaagcgcaacgatcccgaccagatgattttgatcgacaatgggaaggcggcggatttggtgttgggccatcagatgtgacgcctcttcaagactcatttccgggtttccggatacaactgcagaagacatcacgtgtgaaacaggtgtttggccgtcgcggccttgagccgttgttctcaatgcgatatcacggtctgtcagcattccttttaattcccctccgtcaacgacgggaatcgctccgacattatgctggtgcatcagcgcagccgcttcctggatcgtttgattgggagaaacggtagccacgtgggtagtcattgattgtttgattgaactcattgtaaagcacccctttcgacatttattatgctcggggatttgtctcattataaagggagttagaggaaagaaattgtggtatcatgtcaaagaagcaaaaaagagcctgtaaaaaggctctttacacccgtcagatcagccttctgcgaccgcaggcttctgatccggcacctgtctcgaaatcatcataggtaaacggaaaattcattccgcattcgttcagcaaagtgcaatttttatcaaacagcgcccgctctttgacgtcatataccgggtgcggctttgacagcatgatatgtaccgtttgcagacaagccataatttgaaacgcttcttttaaagttccttggtaactttggttttgtaatgataatacgcccctttttttaaagcgctgaatttccagttcggagaaataaagaggaaagacattttgaaacaattcagaggaaagctcttgtatcgcgctttcttgtccatcagtcgctgcgttcacaattctcacatcaatcacctttcttgccatgtgaatatccttaatctttatcaagaatagcatagaaaaaaacgcgaaagctaaggtaagtgtttcctattgaaacagccgctttccgcttgaaaaggagctttatgaaatgaaacaaaatgaccgcggtctggaactcctaattacggaaaagcacgccggacaatggctgttttcagtcctgaaatctgaattccaggcgtcaaaacccgtaattacggaatggatgaaccaagaaagcatccaggtgaatcgaacatcaccgaaaaacaacatcatactgaaaaccggagatcgcttattcattgatcttcaggaaaaaacgggttcctcggtgattccggaatacggagagccggacattttatttgaggacaatcatatgctgattgcgaataagccggcgggaatgccgactcatccaaatgaagagggtcagaccggcaccctcagcaacctgatcgcttaccattttcaaatcaacggcgagcaggcgaaagtgcgccacgttcaccgtcttgaccgtgacacttcaggcgcggtcgttttcgcgaaacaccgcctggcccatgcaatccttgaccgtcagctcgaaaccaaaacattaaaacgcacctatatcgccgcggcggaaggaaaagtgacgcctaaaaaaggcacagttgactcgccgatcggccgcgacaggtcacattccgtcagacggcgcgtctcacccggcggacaagccgccgtcacccattacaaagtgaaaggctatcatcccggtgcgcagcttacattggcagagcttgaactggaaaccgggagaacacatcaaatcagggtgcatatggcaagcatcggccatccgttggcgggcgatgacctgtacggcggaagcaggacgctgtttcacaggcaggcgcttcacgccaaaaaagtcagtgtcgtccatccgatctcaggagaagaaatcgttgccgaggcgccgatgccggctgatctggctcattttacggaaacgtatttttcttaaaccgggtcggcatatataatatatcgtttcggcgcatttccaatgtaagaaaacggatagcaagtggtcaggatcaattcctcccgcttgtgctgaagggtgatgacagatgtatcatcccggctgacgatttttgtacggctgattttataagaaaacgtgccgtaagacagaatcacgttcagtctgtctccttttttcagttcgccggtccggcggaacaccgtgtctctgtggccggataacacaatttggccgtgatcgcccggataatagctgtccttataatgtccgacgccttttgccaaatcatctgcgtcagtcccttcgacgatcgggagctcagcgtcgatttcagggatttctaaaatgccgcttgcctcacccgtttcggggtggaattcttttttgcgctgtgtcagcacagcgctttttgtttttttcttttccaagacaggttctgttgctttttttgcttcttcaagcgattggttcgttttcatatgtgaatcaatgatcttccagcttccgtaacatgtgatgatgataccgacgatgatgacgagaagcggaatatgtttcagtttgttcatcgtgtgcgggttccccttttctttctgaaaagccaatatacgccggcacccgtgatcaccagtccggccaatgccgtctgatggctgcccgctgaagtatcaggcaatgggcggcctttttgtgtgccgctttcagtctgttttgtgctttgttccgaatttgcggcagacgccgcacgggattccggaattgactgcactgtatcagatgctgtttcttctgcgacaggacgtttaggttttttggtttgatcaggctgttctgctgcatccggttttttagcgggtttttccgcctgaggtttttctcctttatcaggcctggtgccgcccggtgtttccccgcttcccggctgattgccggtgtcatcaggtgtttcgcctgctgatgccgtgcggatgcggccgtcggtctgataagaaatcggtgcggaaaagcttttgacatagtctgcagtcgcttccaaatcctcaggccccgtcaccggattcttgccgagtttcccgatcggaccgtattttgcccccgctgccgtcgccataaattgattgactgttactgtatatcctttttcgggctgtatgtctgtcccgtccgccattttcatatccaccgcttgtccggtttccgggttccatgtataggtaaatccgctgatgctgtaatccggaccgtacaccggagaaatttgcgcgttaatgatctcccccaaatcttttcctttgatttcaagcttcgtcagcacattgccgaacggctgtacattataaaggtctccccatgtgatcggccctttttttaagccgtcccggatgcctcctccattcataagcgcaaaatcggatttcatcttcgctttcataccgtcggcaatcagatttccgagcgccgtgtcgccgtcatttgaatatccgcccgttatatcatgggccgcttccccgaccgtttcgctgataatcggtttcactttctcttcatatttgcttaatatgcctgccgcagccgggtcaggcttgattttactttgatcgatatattggatttccgctgattttttcacgatatccttcgactctttatctagttcaagatcggcgattccgattgcttttccgtattcaaatgcctgcacgatcagcttgccgtcgatttctccgtttacgactttatgattgtgcgcggcgaaaatcacatcaatctctgagtctgttccgcttgcaagctttgcggattctcccgtgatggctgagccattttgttcagcagacatatgggcgagcacggcgattgctttaattccttttttcttcaggtcagcggcggcgtcattgacagcctttacctcatccgtaaacgtaatatttttaattccgtccgggatgaccatgcctgccgccgatctggttacaaccccgataaatgcgaccggaattccggaaatgtatttaatttcatacggcggcagaaaggactcccctgacttcagtttacagttggcgcagacgagcgggaaattttggccgtcataaccgcttgtccccttaccgtccggatgatctcctccattgatgatccgtttaagctcattcgttccttcatcgaattcgtgattgccgacagttccgacatcaaaaccgatgtcttccatcaattctactgtcggttcatcctgaaaaagggctgacacgggagagctgcctccgatcatatcgcccgcatgcacgacaaaggcgtgttctttctcggctttcgcctttttaatgtacgctgcggcgtagtccattcgcccgaaagtgccatccggtttaccgtctccgttaaggtcaagctcatattgctgatcaatttttccgtgcagatcattcatgctgatgattctgagcgggacacggccggagtcttcagtctgccgttctttatacgctttatccgttccagcttcattcagtgatcctgcttgtccgattgcttccgcatctttcacgctgaacatcataaaacaaaccgtcagcagacagcacgaaagacgaataccccttattttcttcattcatttccccccctgtcttctaagaaatacgttagcttattttcttaaaaatcacatcacttttttgtaaagattgtcttcactggcgcaaaatagtaaataatccccacgtaacgaaacaggtcttgatgtataacggatcggcttttttcacatcttaatgatgatttgacatgaaggaggaaaacaaccagtggaacagcagcagaatcagcagcagccgccagtaaatcaggggatcccgggttcaccgcaagtgaatcacggaggacatgagcttttcgatatgcatgaagtgctggccggaacagtcggcgttttggatcaatttatgatgctcagacagtttatacaggatcagcagctggccgacatccttgaccgccagtatcaattcattctgggactctataatctgacggcagaatgctttaagaccggccaaaagccttctcaggaaacgtcaacatatatgatgaaggaacagaaccaggccgtctacggtataaaaccgactcagccgaaaaaaccaaatcaatcattaaatgatgtcaaagatctcgggatcagcggccatatgctcggcctgattaaagctcaagcttctctcttgacgatgagctcgcttgaaatgaccaatcccgtcacaagaagagtgctctccgcccaaattcagcaatatgtcgaaatggcgtttgaaatcttcttataccaaaataaacacggttattatcaggttcctcagctcaatgcacaagatatgcagaccatgctgaattcatttgcaccggcccagggacagccgcaaatgcctccgattaaaggacaaatgggacagcagcagcaaaacctccattgattaaaaaacggcgttggaaacctgactctccaatgccgttttctttttttcatatgcttttgtgaaatcatgttcaaattgtttcaggctttctttcgtagccgcttcaaagcctttttcaaaatcctgtgtttcggcggttttgttgataatggttaagataatgccttctccgaatgtttcggttaagtcctttatcatatagaagctttgtaaatagacatctgtttcatattccatacgcgatttctgccattttcggtcggtcgttaattgatcaaacggcacgacggaaaatgcaatcggatcaatgactacatcataatgcgcgacccactcgctcagcccctcatgaaaccaaagcggaaatacaaacgtatccgtccccaattgccgcgttttttgatgaaacgcgtagtgtgtatattcatgtataatcaattgcttatacatgaaaacggccagctcatcttttttcaaaagctgttttttctcttcaggcaaaagccccatcatctgctcctgttctgaataaaaaccgactacatttttcaatcctgaatattgctccatttcagcttcatccgaaaagaaaatgagttcaagtggcgctgcacctttatagccgacaatgatttgattgatacgctttgcgtggtccagcgtaagcttggtcagatccaagagcggcttttcatccgccgtatagtaaatcgctgtatgtttgtaaatttctttattcatgtgttcagtcacttgttccatcgtcggaacagagcggctgttttggcctgacaggacgtacatcatacttactgaaactgctgaactgacagccaatatgacaaggacaccgcacaggatcagagtgaatgccgcccgtttccccatgccgtcacgcaaacaagctcccctccccgatccttcaattttcatctcattctttactttatgctcaggagcgctgggtcgtgacggcagataaaataaaaaagccgcatcaaatgcggcttttccattcatttatttattggggtttgggaatacacgctgcaccatttgaccgaattcatcaaacagaccggatacaggatgtccgttttggattcgttttccgtagccttgcatgcgttcaacgaagtccgggttcgctgatacatatacagtccggacatgtttatcggccgatttcaccttatcggtaatcttatttttcaaatggttggcgatggcgcctttttgtccgtttgtcaaaacaacggctacataagcgctgtttccggcaacgatcacagtcgcatttttaacctcttttaaatcagtcaccttgtcggcggctttatcagccactctcaggttacgattgtcattgtgatcggtgttttggttatgacggttcactgtattcatatttgtcgcaccgtcgttaggcgtgttgcggtaatttacattctgggtgcggttgtcatttcgttttccttctccctggttccccatactgcaccctgcggtaatcagcatcggcagaagaagggcagagataactgcttgcttttttatcatgtgaattcctcctttctcactttacgtataggtttttctattcggcgggatttatgcacgccgtttgcattctgagcggtttggataaatatcagaaggaaagggaaaggtaaacgtaatcaattgaatgaggagggatttaacttgttcagaaaaaaaagcggcgtcagcccgacagcgctgctgatcggatcatcgattctgattgcagctttatcacccgaaatccgccggaaaatctccggaatggtttcaggccgaatgcagcataaagatggtacacactccatgcagcctgctga

SEQ ID NO: 69 - DNA, 114281 bp, Bacillus amyloliquefaciens
atttagatgttttaatcagaaaaatagagaagatcacgcccagcgtaatggcctccaaaaattcttcgcccgtcactctgaaaatcggaaaaaggaacataagcgctcccgtactcatgaaaatcggcgggagaattatttttttaggtgaagcgggcttgtcggaggatttaatcctgacgatcatcacggaaattgccatggccgctgcaataacggatgaaattataatcatcatctttatcattcctttgcttgcacggagtttgatactatatactatactccaaaaacataaaaaaaaccaatttgaaaagagaacacgtttacgttcccgttacccggcctacggcctccagcactttagatgcttcaaacggtttaacgataaagtctttagcgcctaattcaatcgcttccagaacgatccgctgctgccgcatggcggtgcacatgatgatccgggctttcgggtcaaaagctaaaatatcctgcagcgcctgtataccgtttttgaccggcatggtaatatccatagtcaccaggtcgggacggattttttgatatactgccagagcttcctcaccgtcagccgcttccccggccactgtgaaattcgccgattccagaatctctctgattttcaccctcatgaacttggcgtcatctacaactaaaactcgtgtcatattcccctccacatatttaacattaactagtcttattgtaccaaaaacaaaagggtatataatagttcaaaagttattaatccgttacagacccgtaaatcctccgaaaagatttgacagaacgatcagaatgtagctcatccagttaaaaaacagcataactccgatcagaatcataagaatgccgccgattttcatgataagcagctgatgcttgcgaatccaattcattctggtaataaaaaatgaaagaacaagaaaaggaatcgcaaatccgagaacatataaaaacatatacggcactgctgaagaaggatttgtattggccagcgaaaacacggctcctaaaataggcccgctgcacggcgaccagccggctgcaaacgcaagaccgatcagaaccgaaccgataaacccctccggacggcgcttaaagtgaatgcgccgctctttcatcatgaatttcggctgaaacacaccggcagtaaccagcccgaaaagaatcagcatgatagcgccaaactggcggatcgcttcatgatattgggtaaaaaaactgccgataaacgaagttccatatcccaatgcgataaaaatcacggagaaaccaagcaaaaaacaaagtgtatgcacgaggccgcgcttttgcagcatcaccttttctgttttcacctcgtccatactgacaccagttatgtaagacaaaaaagcgggatacaacggcaggcagcatggagaaatgaaagacagaaatccggccccaaacgtcagaaagtaattaaaactcacgatgacacactcccttcgagttatgacaaaatcatttcatttttttaacactttcccgagaaggattactttttatagaaaaagcttatataatttaatttgacatcgagatattatactccttcttatttgaaaaacagtataaatgtggatataataatagcgactcaggtgaaagatttatgtatgaaaggatatatccctgtgattagagagcatctattaaatgaaattgaaaaaaaacgggcagagctgcttaaaatcgtcatgacaaacggaatgacatcaaacattacgatagaactcagccaggagcttgaccaccttctcatacaataccaaaaagaactgcacaccggcagttggggtgaaacatgacgccaaaataaaaaaccctctccgggttttttatttttataaccatgtatctctatatcataatctgtacgtattatttcgcttgattattcatggctttcatcatttgattaattttcttttgagaaggtttcattcccatttgcatcatcatcatgcgtaacatttgttcattaataggcggattctttttcaaatagctcatcatatatttacgagcaataaaaaacccgagtgcaacacctatgagcaatgcgacaacgcccactaggatgccaacccataaagtcattttatttcctccttcatgttgtctagtttaaagtgtactaaaccaaaggctattatacaacatttacatctctttttcctcgtttttagacaaaatttctttctctgaccggatttaaccacccgtagcgccgtgtcttgaaatccattgcaagaaaacaggggctgattttacgcagaatctcaaagaaaatcgtttccgcctcataatctcccgaagctgcaatctcaattaaactgtctttcatcatgaaggtggcgcggcccttttctccgggcagtgtaagccggtaaatggaatccaaacggctgtaactcattcggtttaaatgcagctggagacgctgatgcatatgtatcaccggaatcggttccgttatatattgaacttgcttttctgtcatttgatattcctggggtgtcaggtctgtccaatgatagtctcgaaacaactcaaacatagccgtttcccgcccgaagtagtggttcgcaaactcatcctttatcaggtgcgtatagtaatgacgttccatttcctcatccccttttacagcgcttcgttattgctttctattatacaaaaggagaaaaaaaagaattgtctattactgttatgccgccccttctatttttgtcgcataatcaggaaaaagaggatgatttgactcatcctcttttgtctcgttatttgtttaaaagttttttcacgcggtcaaccacgttttctgcagtaaacccgtattctttcataattgtttctcccggagctgaagcaccgaaacggtcaattgcgagaacgtctccttcaagaccggtaaatttgccccatccgaagcttgaacccatttcgatcgcaagacgtttcgtcacattcggaggaagcacgctgtttttgtactcggccgattgtttttcaaagcggtcccagctcggcatgctgactacagatacgtgaatgttttcttcagccagtttcgcttgagcttcgatcgcaagtccgacttcagaacctgtcgctaaaagaagagcggctggtgattccgtttgggctttggaaacgatataagcccctttttccacgcccgcatacgcttcttcagcctgctgatcaatcgtcggcaggttttggcgtgtcaatacaagagctgtcggatgatcttggctttgaacggcaaccttccatgcagctgcggtttcatttccgtcagcaggtctgatcacagaaaggttaggaagtgcgcgtaaagaagcaagctgctcaatcggttcgtgagtcggcccgtcctctcctacggcaatactgtcatgtgtgaatacataagtgacgggaagacccatcaatgacgccagacgaatggcaggtcttaaataatcagagaacacaaagaatgtgccgccgaatacgcgaaggccgccgtgaagcgccattccgtttaatgcagcgcccatcgcaaattcacggacaccgaaccagaagtttttcccggcgtagtctttggccgtgaagtctcctccatttttgattgtcgttttatttgaacccgcaaggtcagcagatcccccgacaaagaaaggaattttcttagcgatcccgttcagcacctcacctgaagatgcgcgggaagcaaggctgctgcctttttcataaacgggaacttcctgatcccagtctttaggaagctcgcctttcatgccgagtgacagctgttcagcaagctcaggatatttttctttataagccgcgaacagttcattccattcctgttcttttttcgagccggcttcttttaccgctttattgaaatgcccgtatacttcttccggaacataaaaatcttcttcaaacgtccaagcatacgcttcttttgtcagcttgctctcttctagtcctaacggagcgccgtgaacgccggatgtgcccgcgcggtttggagaaccgaaaccgatcgtggttttcacttcaatcaaagtcggttttttatcattctggcgcgctttttcaattgcagccgtcaattcagcgatgttgtttccgtcctcaacataaagaacttcccagttcattgcttcaaaacgctgctttacattttcagagaaagaacggtctaaatcgccgtctaaagaaatgtcattagaatcgtataatacgatcaggcggcctaattcaagatggcctgcaagagaagcggcttcggaagaaatgccttccattaaatcaccgtctccgcaaatactgtatgtataatgatcaactacgttgaaagaatcacggttatatgtctcagccagatggcgttctgcaattgccattcccactgccattgcaataccctgtccaagcggcccggtcgttgcgtctactccggctgtgtgtccgaactccggatgtcccggtgttttgcttccccattgacggaactgtttcaagtcttcaatgctgaggtcatatccgcttaaatgcagcatgctgtataaaagcattgaaccgtggcctgctgataaaacaaagcggtcgcggttaaaccagcccggattctgcggatttacattcataaatttcgtccacagcgtgtatgccatcggagcagctcccatcggcatgcccggatgtccggaattcgctttttcaattgcgtctatagatagtgtacgaatggtggcaactgatttcttttcaattgtatccattataatccccttccatattgttgtaccttttcatcataaagcgatgctgactttttctcaactctttcagcttaaatttgagataaacttgttgaaaattgtcgtaaacacatcctgatattagtatatacgaaaaaagaatacgtattgccgtattctttctgtttaatgaagattatttttctgttgttctctttttaatttttcaggggtgacatcgttgccttccggatcaatcacttttacgctctttaacgtatttttcattgaggagcggaatcctttcaaatactcctggcgaagcttttgctgttcagctttttcctcatccgttatcgtgtttgatttagctttttgagccaattcgttaattcttgcgattttttctttagaaatcataataagctcctttggtgcgtgttgattatatactactaaaacgcagtcttttttacaactgatgcgcgtcagctgccttctgtgtctgcggtatattcctgaaaccgccggtgaaccgtggctttggacacgtcatagccgaatccccttaaggtcgctgcgatttctgcaaaggtaagcttgttggctctcagcctgataatttccgaaaccggaacctcttttttttcttttccgctgttttcatgcctgtttttcagattccgttcaggtttgtagccgttttttacggctcttttcattccccgccggattttcatattgtgaattttcctttgatattcctcaacaatactgacgatttcgagtaccatcgaatcagcttcagaaagctccagttcacctttatgagccgtcgtatatattttcacattctccctgtaaatacaatgcaaaagcgcaatcttggcgtttcctcttcccaatctcgtttcgtcctgcaccaatatcgcgtcaatatgtgattttttaatttcatcaagcatttcaaatactccgtcgcggtccatttcgtaaccgctggctttctcagaaatgactttcacgacttccatgccgtttgcagcagcgatctcactgagctcctcttcctgtctttttaatgatgtttgctgctgttctttgtttgtgcttacgcgggcataaatgagcgccttcatttctctctttcctctctaattgacaatggccagctgatatacggccggatgctttttcttaaccggaagaataagctcgtctccgggctttatatcagcagtttggagatgattattctccgtcacccactcaatgaaatcttctttattaatgtgtttcttttctgctacatgatccgcaagtgaccagagtgtatcgccgtcctgaacctttattttaacatattggctgagggactgatcattccccgcacatgagacaagtaaaatagcggcacttaaaattgcagtaaacagcccgacaaatataatagattctttcgccatgtaaacaacctccgataagaatgtttgttcgctttttatacctttcagtatatacgaacaaacgtttctgtcaatcgtttttttcgaacctatgtttgtactgtcaggaaaatcatgctataatctacttaaaatcgacgttttgaggtgcgaaatatgacgaagctatcaaaaaggcagcttgatatcctgcgttttattaaagaagaggtaaaaacgaaaggatatccgccttctgtaagagagataggagaagcagtaggactggcttccagttcaaccgtgcacggccatttggcgcggctggagacaaaaggcctgatcagacgggaccctactaaaccgagggcgattgaggtattggatgaagaagaagtccaaattccgaaaagccaggtcgtaaacgttccggtcatcgggaaagtgacggcgggtattccgattacggctgttgaaaatatcgacgagtattttccgcttcctgaccggatggttcctccgggcgaacatgtctttatgttagaaatcatgggagaaagtatgatcgacgccggcatttttgacaaagattacgtcatcgtcaaacagcagaacacggccaataacggagaaatcgtcgtagctatgaccgaagatgatgaagcgacggtcaagcgcttctataaagaagacaattatgtgcggctgcagccggaaaatccgacgatggagccgattatcctgcaaaacgtaagcattttggggaaagttatcggcgtattcagagccgtacattaattctattaaacttcatttatcgtaaaaaacccctctgtaaggggtttttttgcataaaaaaagcagattcgccctggcttaagaaacgaatctgctaaggaggaaaaacttacattcttattatccgacatcacacttttgaagtcaactaataatgtttcccttgagaaacttttcatccatttttcaactttgtatattagtgcgtgatgaatttgcttttgtttatcttttttttgggcgggtgcatcaaaatttatatatgaatatttagtacatagtacgataagttatatttaaatataaaaaaacccgctgcctttagcgagtatctattttcaatcaaaatgataatattctacaccgtataaccctttaatatagacggggccacagacgtttgaagaactttcaaccagaatcctgtatttgtgatacggatcaattgattttttatcctgggcactgaggtttaaccagctgccgctgtaggttttagagcttaatgtataaaaatttccgttcagcgccatccgctggagtttcatgcttaaaccgcacgaagagttgttcattatggtgaacttatatcctaaaaagtaatcgtcggcagctacagcccccggattttcaatatgaaactcttttgcatttccctccaaagtgaagcttgtttttgatccaaattcagtggtagccgctttagctgagtgtattccgctaaaacataataaaaaaacagcaatacatatccagtattttttcatttgcatccccctttttacatattttaacttgcgaatcctgtgatgtctattcacattttattaaaacgtatactttataaccactatataccagtttaaaaatttgcggattgcttacaatgaagactaaacgaaataacgaaggtggttcaaatgaaacacgtaattgctttcgcttctaaaacggcgctcacacttgctttactgtacattgttctggatcttatgtaccaagtaacctttttaaacgttctgtttattacagtgatcttaagtttaatcacttattttgcgggtgattgcatgattctgccgagaacaagcaatttcacagccgttgcagctgatttcggaatttcattcattatattatggatattccttatgaatattggcggatttaatgtctcgcctgccgcggcatcggttatctctgcactttgcatttctgtttttgaggcattttttcaccggtatttgcagcaatatgtacttcccgaagattatcaggacacaacagagacggatagcacgctatggagctatcaaaccgaggcgtctgaagaattagtgccggaaaaagaccctcaggaaaaaacataaaaaggaggcattcgcctccttctctttttatttttgcttctgatcgtccagcggcagctgcagcagtgagtctgtgcctgtcgctttcggcgtttttccgtcccatttttcaatccatttatatttgatcatttcatctgacattgatttctttatgatttggttgtaatcagcgatcccttccgcttcaatttttttctttttcgcttcggcttcggctattttaatttcagtttgtgtccgttcaagttcctgtgaagacttcacccttgcatcgatagcttcctgtgtggctttatccggcttcggtacgccaagcgtcagatcgtcaattaaaaatccaagactcttcatatcatcagcaaaccgtttttggacatcagcagcggcttctgcagatttttgcccgtatgtgtcaataaccgagtatttgctgattgattttcgcgccgcatcccacagccttgtttttaaatatgtattttcaatcgtttcaacgtctaccgcgccgaatttgttaaacagatcgactactttatcaggctgcacgacatagttgtaagcgatatccatttctatatttttaccgtctgaggttgccacttttatattttcattattcactgtctgcatacgcaccggatattccgttactttattaaataatccgactaagtgccagccttggtccaatgtgtcggattttaccccgccattcggtgagtatacaaccccgacataaccgttcggtattttttcaatgaatagtgacgctgtaacgcccgcaattaaaagggctgcacctataatcacaccgccgagaattttttttgtgtttccgcgcttattttcgctcatgctgatcttcttcctcccatgactttttgaattttttggctccgcttcccacttgtttaaagattggactaagcatcagccataaaccgaatccgatgatgacaagaagaatgatagacccgatcatcactttcatttgcccacctcttttctttcatcctgtcaattatgtatacgatcttaagaacttaaagtttcataaatttcaaaagaaaaagccccgccggcaaaataggcgtgcttattaataattgtcactgataaaatcagaaatcgtttttgtgaattgataaaaggttccattttgtgtggatgctctgcttttcagcgtaaaagtgtcaaatagtgattttctgaagccggtgctcatttcgatttgaatactcagtccggatgaagattgattggcaaggttgttcggactgacgcctgcatatttatcatttatgccaagaagaacggcaggatacccgtgccgtttcagcacatcggtcaaaagttcggcccgctctctgtctgtaccgccgatttttatctttttatcgtcactgccgtaaccgtgcaatgaaatgacattagagtgctctttcaccatttgcacggccttcggttcatcgaaatgcgaacttgtcaaatgcagagccgcattaccggctgattttaacccttcaaataaatataaactccggttttcggcaatttctctagataactcactggtacccggctctatgcctccgccgtgtatagctaatatgaggacagaagggtcatgctctcgcgttgaaatggaaaaatcggaaggatcttcattcagctttaattcctcgaaaccgccgtaaatatctgaagcggcattagcctgaaagaacggcaggagcaaaaacggtaaaattaaaactaaaattccttttttggttattgatggcatttgtatgtttatgttacaatacaaatgcttcagcctttgaagcgaacggcagaacagggtgactttggacggtttcttctgctctgcctctttgccagctgctttacgctctactcttctaaccctttttgccataacatcatcctttcttttgtttacacttttgtcacaatattatatacgttggacaaaacctccgttcatcttggagaataaaaacatcaaaacaacctctatcctttaacctaaaaaagtctttctgtcaaagatacaaaaacttaaatgataaaaatgaaacccttctcattagttttggaagagagtgaggactgcagggaaatcattttatcaatatgctgagctgggctggcgtccggctcaaatatttgctcccggcataaacgattacggagcggccgcttatttcgaagtcaaattcgaacgtgacgtatgatttcccaattcaagaatcatcgaaacaaattgaatgtaactgctgtttccataaaaaaaagactgctgttaagcagccttttttcgttttatttcgtgcctgttgatcccagtccgccgcggtcattgttcccgagcttgtctacttcgatcagcttcacttcaggcattttcttcatgattctgaattggcagatccgctcccccttggaaatgtcggtatcccgaagcgcgaatgcaggaaaaaaccagaagtcattgtcgcctttataagattcatcaatgacacccattgaatttgtctgaatgataccgaaatgcttatatgtacttgaacgcggaacgacatgggcctcatatccttccggcagttccatcgcaactccaagcgggataagtttgaattcaccttttttgattgttatatcttcagctgcccgcagatcaatccaatcgccctgttcaattttactgattctcgtttgcgtatcatctgaatatttaattttgatttgtaaagtcattttcgctgctccttttgcttccctatttcagtcgtattgatgaccaatccgtgccccattataccatttaactgttaagaatgttgattttggtgtatatgcagccgaagaggaagcactgcgaagtcaatgagaataaacctaaaatgagggcccctcctatcagttttttcctccattttcacatgacagcttcaattacaataatgcaaagctttatatccgttctttcaccagagcttttttaaaatttcaccttggtttcaaaaggaatttcgttctgaataaagaatttgaagaataagcgcttaaagggcgcgcgactcttttctgtcccctgcctcaggcgcttatatcaaaagaaagaggtgtctttagaatggttcaatttaaaaactttcctgatccgtctttaaacgccccattgcagtctcgccctgcacagccctctgaattggagcatctcaaagcaaggatgcagaattttattaagcattccgcaacggatgataatcttgagatcgcagatgcccgggtgacggcggaaggaatggtcacctcacttttaaaagaacggcttgatacagaatacgaaatgcttaagaataaaatcacccgggaagtgaatgtggaggactacggagcgatccctgacggccgggacaatacggaagcctttcggagagcgatcgggaacggccgggtcaaagtaaatgttcccgcaggagaatttttggttcaagggataaaactcccctcatggactaccatttccggtgagggacaagggattaccgtgctaaagcttcatgaggacactcccgcatacgaatgggtcattactaacgatgattacgataatggaaaccgtaatatttttgtccagaacatgactttagactggaatcctgatcgtcaatgcggggtcaggaaccccggaggacagttttccagctgtttaacgtttgctaatgtgcaatacggctggattaagaatgttgaaacggttaacgcgggtctccatggtattgatattacatctccgacttacgatcatttgcctgaaacagaatggacgaaagacgggtgccgatatatatggattgataactgtgtggcatacggcgccggagacgacggcattaccacccattacagcgagtatattttcatttccaactgccattccggaaacccccgcggcacagagcatgctgagggcagcgcaaactcgaacggcattgaaattgacgacggctctaaacatgtatggcttttaaataactatacgagcggaaatatccgcgggattgaggtaaaggcgcacagcctgtggccggcttctcaaaatgttcatattatcgggcatgtttcgtatcgtgatgtacgttcatttgatattcgtcatatcggccatcatcaggcctcagaccccgaaagcacgacggcttatgatgttactttaaccgattgcaccgcgattgaaccggtgtttaatgctctctatgacggtgtgaccccgagggcgctggtcatctctgcctataaaaacgttaatgtaaacggattcacagctattggtgatccctcatacgactatggcgggaatccagtcgtggctcttcaataccgcagtcaaaatattacgatcaacggcattaaaatacgcggctttacacaagcaggtgttgacatcaatatatccggcggatcaaataaaaccgattatgttaaaattttaaattttgatatatacaagtcttctcctaaaggcatctcaatcggcggaggccaatataacgtaaatattatgaacggtacgatgatcggagacggcggttccgtcggaattacgtcccctaacagtcaggccgtcattctcggggtgcaagcggaaggttacagcgcggccgcatctataaaaggacagacttatgagcagatccccgtcaatttaaagggaggcgcacagctcgcgaccagctccggttttgcattcaacccgacaagcgccgttattgcgggaacaggcgatattacggccagaggtgacagaaatgcgatcatcagctcttccggaggttcaagttctgaaggttcaagggcatttatcgccgcttcaaacaatgtccatattacgggcagcaaagtctccagaacgattctgtcatcagaaagcattacattggaagaaccatacacggttgccggagggcatcagtccatcaaatggaaactggattcagcgggcggccacggtacgttcgccggagctgtcacctcttccttgtcagggtacggagaatattttgaaagtgtaaccggtcagacaattcccgccgggacgatcgtcacagtaaaaggcgaaaaaattgaaccggctcacgtcggtgattacatgctcggcgtcatttcagaaacagccgcttttatctcaggagccgcaagcttcggatggcaaagccgctttttgacaaatgagttcggcggtttcatatacgaaaatgtgactgacgaagaaacaggagaaacggtacgcgtgccgaaacaaaacccggactgcagtccggctcttgaagctgactatgaagcacgcgcggccagagacgaatggcacattgtcggactcaacggccggcattacgtacgggtcgacggtacggtcagcccgggagattatatcacggcccataacggaatcgggactaaagccgcggaaggctggaaggtattgaaactgacggccttatacagttctgaaaaagggtacggcattgcaattgcggttatcaaatagggtctcaatatcaggatcatctcctctcttttctatcgggcgggtatgatcctgttttttataccgaatgagatgcctctttttcagcataccgtttcatttgtccaagccatccatactttctgtcatagaatactaccgtcagatgaaaaaaggaggaatatgagtatggatatgggtatggatatggacatggatatggatatgaacggacattatgatcaccacccaaagcaacctaaacaaaaaaagaagaaacaagataaaaagcatcttgattatgattacatcgttgtttataaaagaaaatgcaaaaaatgtaaaaaatgctgctaacttgacatatcaacactttttacacccggtaaactccgggtgtttttcttattatggcgtttctccgggctattttcacccaaaatccggtcatcctatcacaatacataaaaagactctattattttcttccctttttgcctaattaaaagtatttcatttacagaaaacaacacaaatagaatgacatgacttttgagaaaatctactctttgcttggtcaatttttctgcgataccatgaattcgcaacaatttttaaaaatttccttaggaggtcatagccatgaaaatcgcagaacggtagtcggatcatgcttagctttatctctaacaattcctttcacagccagtgcctcagcagccagtcagtctgaacacgcaaacgcgcctcacgtttcacccgttgcaaatccgctagaaagtaaattatcccaaacagcagaccaaacgtaaaagcagcaggtgttgatgccgggctgaacgtaaacgtagatgttctcggaatctcagatcgcattgctgaagcggttaagtcagatcaaaaccgaaccggctgggtaaaaaatgttatggaaacaacattttacgcatcaggacagaagtacaacgtcatggtgttcaatttaaatcaagaatatgaagaccgctttaacggcgttcaattttacggatcagccgtttatgacggtattacttacagaatctgggtcttcgaagacgggtccttcgataacaaaggagacgggggctggatcaattgggctttcagagggtggttcgatcgtgataatcagcatattgaattccacagaccttaatacggagaaaacttgcggcagcgcccgcaagtttttttaactggactgcacatttttcaccgttataacgactatacttgaagtgcgggctccgatcgcatccccggtaaagtctttcaaagtgagggtaagccatgtcaaagtctttaaaaataatgttgtggagcatattggtgttcatcctcttgttagtgattatcggaatcgtttcttacaatcaaactccgtctgcagaaagcgcagcggaaagaatgctttatggcttctaatcaatgttaagccttcatcggcttttttatttaccgcagaacacttgaatttcttctatttagatcgttaacgttcccattcagaatggagtatacgcgtatatcatcaggcagtccgttttgatacatggttccgattatgcccttcgcatctttttctctattccttctcgcattcccttttttcatgctgctgctcttgaaatcaaccaatcatttcttcagcctgttccgttgaatcaaaaggttccaatcctaatagcttgttacttttcattttttaaaaaacaagccacctgcgcattctcttcgcaacttctcaatgtatgagcctacccgtctctattacaggaagcagtacgatgcctccttttactcattttaacggatggtcatgtaaaggaaatatagactaaaaaaccttttttcaaaaagtaaactagcatccctatcaaactttacatttcggcataatatgtattaatcctctttaggaggtgagattatatgggattctcaggtggttatggtagctcctttgcgttaatcgtggtgctattcattttattaatcatcgttggggcttctttcctcggcggttattaagaatcctcttacctccgcatccatgtcagcaccacctccatgatcgtacggcgccataaatgaaatgtttatggcgctctgctgtttttccccttttcattcacacattaaaactaaaaagatcggccgatgtatcaacatgcagccgatcagtaattcatagattattgtgtaaggtttacatcgatgacgttatagaaggcattggaagtatccgcaacgtcccatacccctaaaatgacatgatacccgcttcgatcagtcggcacaaaaatcttatgagtcagattcgtatctgccttggaaccgtcgtggtttaccgttccgattaattcgaattcatctcttgacaaaggtttattcggattccagtttttcttggtgatataatagtgccactttgatgtcgcatgaggggccgtgtagtaccaagtaaaggtgttaaaaccgccgcggatgttttgttttacccaataatctgcagtctgcttgtctaaaccgaagtcaatttgtcccgatcctccatttgcagacgcaattcttccatctggcggacctgcagccggaaatcctttcggcccttctacagactgaggattatcaatgacggagccatatttctgcgcagcggccgtccagcccaatgtttgtttctctaatgctcccatgtacgctctgctgacgggctcttttatatacccgtgcgcagatgcatcacttgtgtagaaagcgcctccaatcccaagagtaacagttaaaactgcagctttgactaaacccttcattactgcatcatcctccctcttttattaataaaaacctttcggtatatacacttcacgatggaggatgaaatgaccttccttttcttgataggaaaaagcaatgaggttcgcgctttcccctttgttttttataatcataaagaaaaagcagggccgattctgttgtcgaatccgcgattgaccggcccgccccttttgctcagaacttcattcgctggatttgccggtttcttttcggataaccggtgctacttccgctgctaatcgttcgatgttttccgcggcttttttaaacggcatacctcctatatcgatttgcgcgagaaatcgctgatgtccgaataactcgtattgatgcatgattttttcaatgatctgctgtgagcttcccacaaataaagctgtttcttttccggacgcccgctcaaaatcttccttcgttaaaggctcatcgatcccgtgatatgaatgaacgtgagaccagtaatttgaatgatacggataaaattcttgtattgcctgttcatttgtttttgaaatgaacatatgtccggttacggcaaccttcacatgttccggaggatgaccggctttagaagccgcttcccggtatttgtcaacaagcggcttagatgacatcggatcaccgctcagtacagctaatgccaaacccgcgcctgcacgcccggcccgttctgcgctttccggagtccccgaaacacctaaccatagcggaatgcttccgcgaaaaggccgcggagaaatttctgcctcgcgcagcggcggccggtaacgtcctttccaggtaaccgattcttccccggaatttaattttaaaaagaggtcaatgtgttcttcaaacagttctttataatggcctacgtcataaccgaaaagaggaaacgagtctaaaaatgcgccccgtcccgcaatgatttccgcccggccgtctgaaataaggtcaagcgttgcaaaatcctcaaataaacggacgggatctgctgtggataatacagtcgtggcactggtcagcttaatattttcagtgatctgtgaaatcgctgataagatggccggcggcgaagataccgcataatcaagacgatgatgctcgcctacaccgaatacatcaagtcctgcgtcgtcagccagtttcgccagcttcatcaattcatctatccgctgctttgcgctgactgttttccctgtcagaggatcgggatataattctgcaaatgaataaattccaatttccatacaatcacggtgatcagccctcacatttctctcctcctgcactgtgtaaaaaagcttttatgttattctattcagccgttttacaaataggaattcgttcaaaataaatacagaagcttaacatgcagaaggtcgggatgagagggaaaaaagtttctggcgcccttcaattctgcccattacactcatgcagcccgactaggcaagaacaaagccgccacaaacggattcgaattcatgtgtgcatattcagtccaattcaatccaatcgtgatattgatcataaagctttcgtattcttccggcatcaagagcaatgacttcacaccctctgtcatcatacagaaagaaaataatatcttttgtcatattcacaaagaaaacatcaggatacccaacggaacagcccccgaaccatggcttcagcggaaaatcttcgtggacggctgccttaagtaattggggaatacgcagatctttccgtttacataataaagaaaactgctgcatttcatattcttcttcgaccgggcatggacaggtcttcacttgaatccgatataaatcatccttacacttcagaaacggctgataaacctttaattttctcgcatgattaccttgagatttgtgcttatacacgttggcaacaaggaacgtgtcatcgctatgttcaaacagctcattgaaaagtgcggcggtttgatgatgaacaagctgaaaatactcaagattcaaagcaccgctttcattaaattgatacatattgccgccgagagaaaaatgaattcccacgtcccattgatgaaaaatgccgggcactaattttaaaagtcggaaacctttccttcagataatcatttattttcattcaaacatctcactttccttttcccgctccagaagcagaagaagccgaaaacattccgcttatttctttttcacccttgttatattattccgattggaatacaatgaaatagaacactgtgaaccccattgatcagggtggatgctgctcacattcatcctgatcctttcttttacacaagatcgccccaactttgaacccctccgtttccaaccttattcattgatatcacatatatttcaatggtattattttcttatacataagcttcaagaggtgtcagctttgaataacatcagaagattaagagcatattttcagtctcaccgtaaaataggtcttgactctgaacagcttttaacattttgattatcaaccacttttccattctcaagcgcttctttaaattcatcaaaatgaattgaacattgctgattcgaattacttcctgcaccttctgtcgctaaactgcaaaatgtccatcacaatcatcctctctctaattttacaacattgctataatgattttcatgtttttcccaaccttcaagctgaatctttttgttcgttactaggtaacctaatgaagtatttaacttaaatacaaaaaaacctgcttctagcaaggttttttcggtaaaggagaggttatctccccacaaattctattaactatgtttttgttttaaccattctttctttagcaatgcgtattggtaagtgttttcatatttaggtgttccatcctcgtgtgcagtaaatgaaataaattcaagaaaataaccttctttacgcattcctaatctttcacatagtttttgtgacctgtagttatcatcttcaacatatgcataaagccttcttgcttctttttgcataaagagatactcaaagaaagccttcgcactttcacttgcgtatcccttcccttcaaaacgggcattgaaattccagcaaacagaataggtatctggctcttcttttaaataaaatagttctccgactagatcattactgtcttttaaacaaactgcaatataagagtcatctcggcttcttttttgaacgtttacggcagcttcttctaacgtagatattctgtcatcaagaaagcaattcactctcggatgtgccgaatattccaacagaccttgcgcatctctttcggtgaaatttcttaaaattaagcgatgggtttcaattttttgcatttgcagtctcctgtttcattgttatcgatctttgaaaagaacttcttcgtttgttgaagaacttatctcaatctatttttactataatgatagacgttatcatctttgtcaaaaacagtaatcattcatttgccgcccgcgatgtaaagtactgaacaattttcgtgaaaaaccctcagtatcgaatatagaaacgagcaatggtaattaaacaaagttaagccattaaaagcttattgagtattttttcaaacttattcacgctcatcatctcatgagtgagaaatgtccctttataaaacacgctgaaagtcgtccaaactgccggggatttttgcgccatatcttttgacgttattcgccgggcctgaaaatgaagtcctttcttttcagtcagttcctttaagtcctttaacaatccgactgcaaacgggcattgagctgtataaaatattgtgattccctcatcattaacggaattacttttcacctgttttttaaatacaggaggatgtgcatgttcattccacgtcagtgacaccaactgaaaatagggttctgcttcatcttgcacagcaaatcacatatgttcaaagaaatgcttatcacttaaataagggagttttttcttccccactatatgaactatcccatccataccgcgggattttgcatctgacacacatttttctaacaagtgtttcgcatgtccgttattcttatatttacctgagacccaaagacaattaataaacataaaatgaggtgcgcttaccggaacccacgcttcttctgcaggtaaatattcaataaaaacttttgcccgttcgtttaggcgatagaacaccaagccatcaatcattcgatctttgagccagctcttcttttcatttaccgcatcctcatattgtttcgtacctaatgcacagcaaatatgattgtcatcaatattgtccctagtcaactcaatgtattccatttttcctcacccgctttcttttgggaacatcagctttacttgcagtgaacattgtaatttctcagaaatatagagttccagaaccaatataggaacgcagcaacaaagcacattatgtaataaatgaaacttctgaaaactgtgaaatcaattgacggattgcctatgtgccagaacaagaacacggctaaaaaagcgactgctgtataaatgaaaagatgaaccaaactaaactttttaggcttctttcttagccatagttgcacaggaacagcaaacaaaaagtaagtaataaatgcataaaagcaatgataatcacagtaaccaatacaaatggcacaaaacccgagtatacaaacatatatagcccgaagatcaaaccatacgacaaacttggaaaagccaatgtgtaagtatagctttgacttttgctccaagtcgccgcttccatatagttcacctgctttttataaaaataaaatttccatttttttattgtttaaaatcagtatatatccatcactttaaaagatctatgttttttggcagatcatcaattcactatcttaatatccagaaattttattgccattaaaaaaggtcaaggaaataccttgactgtgtatcgctcaccaatctgcatccggctcatcgtgttcgaatccgtaaaagcctttaatccacacatctccgcagccggctccttttgtgatcaataagtaatgatttctgtttgcatcaccattcaccttatcagccgcgctcaagttcaaatgattatccgtgaaattcttttcactaagggtaaaatcatatcctgccagtgtaattctctgcagtttgatatttaatgtacatccatcagcattgtagatggtgaacctgtatcccagcttagtcggcatacggtaggcaaaaatataaaaaaagcaatacctaaaaaggtattgctttttttatttgtcattatgagttttccatcataacaacattggtaatattattttttattccactgtttactgaaatccatcgttttccgtctaaggagaataaaacagtgccggaatccccaactgcaacaaaacgtttatttacgtaatcccattcaacatcatttagtttgttggctgtaggagaagatgctttagtccaattgtgcgcatcctcagaataataaattgatccaagatctcctacagtaatgtatactccatctttataagtaacagaattcagaggagcattataccccagtaccgtcgtttgaaaactttcgcctttatcagatgaaacagcaactaaaccataatcgctaaatgtccctcctgcttgttgtcctacggccaccaccttatctccattgtaaatagcatcaaaatattcaccatcaaaacttccttttctggtaaatttaataccatctgaagactcacttatatagtttgtagcatatgagttaccgaacataagaatcttatcatcaattgcaactccagtgtacacgacacctaagtagccacccgtggtgtaacttgactctttggatttataaccactgactttctgtgaccagctcgcatcaccgccaattgatgtgaaaattgttgaactgatcccatatctgcgtgattctcctccaccggcagcaaatttattatcacttgttttgattaaatcaaaaattggcccgcctctaaaactcgcaagttgatcccatacttttaaactattattccatttcagtatttttgcataataaccatcgtccgcagtagcatataggtttttgccatcaaatgatttaacatctttaattggtgttgtagatgatttataaacccatttgttatcagcataattaaaaacagaactagaattaacaaaatgataatgacttatatctcccgactcagataataatgaagcattttcactaggaagaatgcctgcttccgcagcagaagctacgttattcataaaagaagtttgtgaacctgactcagttacaaaacctacacagcccaagatagaaactgaggaaactattttcattaacatactactttttctattcatatgtacctccgtaatctaataatcatataatagttcaatatttttactgcataatattaacacatcatcataaaaaagtcaatttacccataaatacgctcggaatacgtccgattctcatgatggatgttcgcacataatattttaaatacaatattacatcgtttattgaatcactaaagacagtatcagaagataatatctagtgagtttcccgaaagtgtaaagtggtgtaacagcccatcaagtcaaatatcgacagaaagattacgaccacaaattcaaagcaagaaacgacagtccccatgcagatagaccaaacattacaaagaacctaagaaaagcttcgaattttgtaagtcttcgctcccttttcgttttacccaatttccaataaacggcgtagcaggaaaacaccaaaatgagttgtccaagtcgcgacacagattctaagaattctataccattcattgattttcacctcgtttatttaaacagagagtttttcttacagcgtttatccaaagcactaatttcttcggttataaaaaccgcttgaggaatttgtttgtaaaatggtttgcgtgccgcttgataaaaacagcccacccttactcccccatatatcaatcaagatgaattttattatctcagatggaaagaccatttccaacagttatgtaaaaataagtaacttcactatgctaattgtataagaaaagttgtcttatccagcagaaccatgagtgctgaacttctacgttaaagcgtaaaagacggattataaaagagccgcttttaggctcattcgcgaagcatcattttatttttatgattgtatcctcctgtcaatcctattgggataaaatttgagggaaggtcagttttaatccgccgccctgctcaccttcgacccttcttgcagcttccccacaaatatccgatgaacagcttttaactcttccctttgcgaattcctaaccgaaatctgactctcaaaacttatctgaccttgcatcgtgggacgccaattctcatgcattaatttaatttaggatattcgcattttgcttttcgttagctgaataacgctttataagaagcgggaaattcttgatttacgcgcggcacttcccgtgcaaattcacgttcctcttctgtcactcttctgagtctgtcagctttttcttgtgtatctatgtcggcaccgggaggaacgaaccgattcggtgcaatccgtacaccatttgtgataacagcattgtatgaaacaaatgatccttttcctataattgcattgtacacgattgccttaaaaccgatgaacgtgtgatttccaagataacaagggccatgaatgggagcgtcatgcccgacacttacattgtttccgatataaatggaatatgccttatctttgactgtgacaaattgctttaacaaaccatgtaaaatgacaccgtcttgaagatttgtatttgaaccaatataaaagggtgttccttcatctgcacgaatagcagcatttggcgctacataaacattgtcctttattctcacgtctcctatcacgctggaaaacggacttatgaacgacgttttatcgattttaggatatctttgaaccggattaaatgatgtaacagggttagggctgataaagggcgcaaacttagtgagccgattatcgaatttatcttccgtcagctttctatcgctcaaaaaaagacctcctttgaaaacgtgtctattgatgtatactatgtaaattctgtgcatttggagacgacaatccccccatttaaacaccattcggatgacaaatcatccaaaggatctttcctgcatggctccctcaatttttgcagaaacacttgtccgcaagaaaatgtaagggttttcaaaataagatcagtgtgctagattgtaagataagtaaaaattttctgctaatatctgaaaggggtgtatgatttgaaagcagtagtagcaacaaaagacaaaagtatagcgattgtacaaaaagaattacgtcctttgcgacatggtgaagctaaagttaagatggaattctgcggtgtatgtcatactgacttgcatgttaaaaatgctgatttcggggatgttacaggcatcactttaggtcatgagggaataggcattgtaactgagattggtgaaggtgtaacaaatttaaaaaagggagaccgcgtctctattgcctggatgtttgagagctgcggccgctgcgaatattgcttaactggccgcgaaaccttgtgccgtgatgtgaaaaatgccggctatacagttgacggcgcaatggctgaagaagcaatcgtagcggttgattatgcaataaaggtgccggaacatttagaccctgcagcagcaagcagcattacttgtgcaggtgtaacaacttataaagccgttaaagtcagtgaaattaagccaggtcaatggatcggtgtattcggagtcggcggtttaggcaacttggctgttcaatatgcaaaaaatgtctttaacgctaaagtaattgctttcgacattagcgatgaaaaattgaattttgctaagagcttaggcgctgatgcggttgtaaacagtttaaacgaagaccccgtcgctaaagcaaaagaagtgactaacgatttagggcttgatgcagtggtcatcacggctgtctctaaaacccctttcaatcaagcgattgatgttgtaaaagcaggagctcgcgtagtcgccgtcggtttaccggtggacaaaatggatttagatattccccgtctcgtgttagatggaattcaggtagtaggttcattagtgggtaccagagaagacctgaaggaagcttttcaatttgctgcagacggtaaagttgtacctaaagtgacaaaacgcccgattgaagacgtgaatgatatatttgaagaaatggagcaagggaaagtgaccggccgtatggttatcgattttacttcctaatcattaaggctgccgggaatgatacggcagcctttgagctctattcttgctcagcgccccactcagactgaatgagactttgtcatttagttcagaaaaaaagctctacagaccattcagcggttattcattttgcaagtactctctgaactaaccctgataccaatataatgcaaggtcattcattgccgaagcgtagccctgctgtcttaacatagttgttatgctgccccgatgataagttccgtgattggcaacatggaataaaatttctgagtaagcagtttctctgtaacctaaccaaggattatttaagttcattttttgttctaaatctgtttggctattcatccattcttcaaactgtgaagccagttcttcataagacgccgcaaattcatctgcagaatataaatgagccctttccgcataagccatagaaccttccaatgcttcctgcatgtctatccctttaagcacttgaagccacataacatccaccgcgcagatgtgactgaacgtttgagcaattgtaggatatgaactgtgaacctcttcatattcatcttcactgagtaatttgaggcctttttcgaacttctctaatttaatctacataatagttcactgaatctctcaacaatttcagataaaaatcttctttttatagagatgttcgttctatcgacattcttgtgataaatatggtaaaattcataaaaacaagggagtgttgttacatatgagtcttatcattttagcatccatgcttttatggggtgcagtgatccacgagctaaacaaaccttcaaaaaaacaaagtaaacgaaaaatgatccctttggtatccctcagttctttatctactttaatcatcacaatttcgcttttttctaatttaattggttgatatttgttatgaggaaacccgccagaggttcctcataacactaaaaacctactcactgcactttttacagcagaccttatcagagtgtttgcttaacactttatccattctccccacaggcatcttcttctcactcggaagtgtaagataagctgttatctcatcccctgattttaatgtttttccgcagatagagcattttaactcaatattaaagaaatttttcaatcccattcagaagcctccttatttacctttataaagtaatacgttaatgctttataaaagtttcaggttaaagaaatactccttgcctgggaatatagaatatacttcgtttcagttgatcctcagccgccccggtcatcgttgcctacaaatataccccacccaataggccgctttttcattttaagtgaaatcatcttcatgctttgaccagtttactgcagtgtatggcttgttaatttgtgacatttatttgtcctcttttaattttttcttcttctctcaacttgaaaaaaggaattattttataaatattgtaaatttatagctgtatcacattcactattaagaggaggaatacgaatgaaaaagaaaattattgccggcgctcttgcttttgggttaattccactaatggggactgcagatgtttctgcaaaacctttgcaaaacccagataaagttatgaaacctgctggttggtcatgtgacgctccgtatattgcgtgtcagcctttttctggcggtaccggtaagttttcattcaactatcaaggcagctctccaggaaaaatcagagtttttgttgcgaatgacggcagcaaatctttcaaattcaccattaattatcctaatggaaatacactcttatcctctacgacattaaatgcagggaaaacgttcattcaagaattcagcgttaaccaaaaaggagaatacatcctgaaatatgatagcggcaccggtgatagtgtcgatggtttctttagactgttgagatttaaattccgttaggaaagtcggcagttttgccgactttcttttacaagcattctgcaggaataaacgtaaagtttggaataaacatatgacctttttgaaacggaaactttatctgcaccacatacccgcaagcagcctccttgtatcgtaccttccgtccctttgtgatttgttttgatttgtcgtatactgcgcttgcccgggaaatgatgaatattttcgttaactataattcccctgtacctcttcgtatgtggctctgcatgatgaagtaacttcatggctcaccactttcatacacagttttattgcatgtttagccatatccctcctctttaaacagcaaaccgtccaatccatttctctctttcagttaacttcccattattttatattcttctaagctcttcattttagacataacatccattttttcttatttagacttaaatctatgtcgaaatttatcgtccggcatattatgtactatcctaacaacaggaggtggcaataatatggggaactacggtggaaattacggtggaagttctttcgtattgatcgttgtgctgttcattttgttaatcattgtaggtgctgcattccttttctagcacattgacgatttatattcgtctcccaaacattgcatcccttagttcggacagacgccataagaagttttatggcgtttttacttttaaaaaatcaatctaagataaccattttttatttttactctggtaagcgggagagtttcctcccctgcctgcgccaatattgccgctatgaagaataaggcgaacaatccaattcggaataaaaacttgttcatgaacaaaacttctaaatagttgttaaaaaactaaggcgtttttaattcatcaggattacagatgttgtgaacttaaaaaggatattactcaccccctttataaaattgtcattcgttagatttagtcactgaatcttatttgtttggtatcttagcggccttccacacttatttaaaaagggtccgcctacaaaatactaagtcattttcacataaaaaaaaccggattcctcctttaagaggttccggtcttttttagttaaaatgcgggaaatatctggtgacgtgctgcacacccccgctattataatatttcaatagagccttctgttccatgaacgcgtattcgctgcccatcttttatcaattgggttgcattttcaactccgacaactgcaggtaagccgtattcacgcgcgataaccgctccatgggtcatcagtccgccaacttcagtgaccaggccttttatggatacaaacaatggtgtccagctgggatcagtatagggagtaactaatatatccccatcttccaaatcggcatcttccatgtttaaaataacccgtgcccgcccctctatgactcccgaggaaacgggcagccctgcaatcgctccagccgggagattttctcgtttgtactcgcctgtaacgatttcaccgtcagatgtgataacacgcggcggagatagtttttcatatacttggtactcgccttttcgtgtgctgatgatttggtagtccaatttatgtgtgcgtacgacttcctgaagttcttcaaaagtgagatagtatatgtcctctttttcatgaataacgcccgcttctgcgagttgttcggcttctttcagtaaagcctgcttataaacgaagtagcggctgatcatgccgtattttggatattctctgaagccgctgaagttccggatgatgcggatcattcgtttggtttctttggctttttgttcaccatccggtaattgcttcaatcggtctaataactcttgttctttcttcaacgcctcctgccgcccttgctcaaatttccgctgactggcatttggctcaaagtttttgagattattaagaatcatagggacaagtgcagttggtttttcgctccatcgagttcttgtcatatcaatttctccggcacatcgcattccgtacttgttgagataagcatagatcgcgtcacgggtttcccgcccgccttcacaggtcaccagcccatccaaaaagtgatcatcttttacattctctaaataggcaattacttctggataagggcggatcacatcggcgacgtccaatagcgcaagccccatttccgaggtaatattatggggtacagattgagaaagcgtatctgctgcgtttttttcacctaaccactcgttcattttttcgttaatccatgatgaagcatccattgcagttcgaatcaacaccgaactttttgggttaaatagaatcttctttaattcctcgatatcttccaaaataaaacgaaataaatcagatcctgatttcgtctggatattttgttttaactcttctatcgatgcttgactgctcttaatcaaatcagaaacaatggccggatcgttttcagcttgatccggcatatctgcattgcctttgccgggaatctgtgccgttttatcaggtatcggcttaatgaaatcatctcgctctattatggtcataagtgcgtcttttaagagcggatcgtgctgccccatgccttttaagaaaacttctctgacagtaggagatgccagttgatgtgtgacatcaacgaatagccttccgccggctttacgcatgggtgcagcagtcgtcaacagaaaaaaagacaacccaaggggttttatgggatccgtcatcatttgctgatgaccaacagagatatagacgtgattttcttgatcgttcgcttcaggaacggggtataacgttgtgatcggacgactttggacaatataaaaagtatcgcggtccaaacaccattcgatatcttgcggctggccgaaatgagcttcgatctgtctcccgatacgtgccagctgtaaaatttgttcatcagtcagtgtttgaatcttttgctgatcaagagcgatctcctgtgtttccgttccgccttcttttcgtccatagatagccaatttttttggttctattctcttatcgacgatttgcccgtcctgtactttataacaatcggcagagactaagccggagaccagtgcttcaccaagtccaaaaccggcatcgatggacagcagctttcggtttccggtcatcggatcagcggtaaataaaattcccgaagcctgagggaacaccatcctttggatgataacggataaataaacttggctgtgatcaaacccattttgcatacggtaaatgaccgcgcgatccgtaaatagggacgcccaacatttactaatatgctgcaagatcgcatcgacgccggtaatatttaaataggtgtcttgttgaccggcaaaagaggcatgcggtaaatcctcagctgtcgcactggaacgtacggcataggcatgttcttcgccgaaccgggagagatggcaagcaactgctttgactacatctgaaggaatttctgcttccataatggtttgccggatttttttgctgacttcaccaatttgatcccgattctccgctttcagcatggtcagttgatccaacagcgcttgtaacgtttcgttttgttcaatggctttttgatatcctgcggttgtgacacaaaatccttccggtacttgtattccttgaatttttgataattcccctaaatgtaacccttttcctccaacgagcaaaggctgtgttttttcaatttcgtgaatgccgagaaccaaagaactcattctatatctccccttcaaaaaaatttgacaagagcttttcagcatgatataatcataatataagatggataactatgacttttcacacagaaagcgcgcgtgttctgattatatcaccgtgtctgtttttgtgcaatataaaaagaacctggccaatttggcgaggttctttcttcatttttgtctaaagctctttaaagctgtgttgagatcttttgtgtgaacgtaaatgttcttatacaactcgaatagtgttttatatttttgaacgttttgttcttttggataaaatgcagctgcttcatgaatgaactgctctgcacattcttcaagagagtcaaaccacccgcttccgaaggcagctaacatcgcagcccccatggcgggaccttgttcattctctaacttaaccaccctcgtattgaaaatatcagcctgcatttgaagccacgtttcatttttagctcccccgccaatagagacaaccgtatcaactgattttcccgcttcacggaatagctcaattgattcatataaagagaatgtgatgccttccattatcgccctcaaaaagtgctctcttttatgggctccgtccattccgatcaagcttccccgaatagatgaatcagcatgcggcgttctttcaccgactaagtaaggagtgtacagcagtccatttgctcctatcggaacagattccactccccgcaataattgttcaaacgattcgttcggcgcaaacgttcttttaaaccagtccaagctgtaccctgcagcgagcgtgactcccatcgtataaaaagaatccttctttccatgattaaaaaagtgcactttccctttaaagtccctttctttgtcttcttcacaggaaagtatgactcctgacgtcccgatactgcataatgtttttccggaagaaagaataccggctccgacagcaccgcaagcattgtctgctcccccggcgtacacttttgttttttccaacagcccagtctccgccgcaacgctcggaagcagcgatcctacacagtcatgggattcaacaagcggaggacaaatttccgctgaaataccaaattgattgcaaatctcatcgctccactctttgcgggtcatatgtaaaagtaacgttcccgccgcatcggagtattcggtgtgaatggcgccagtcatgcggaatctcacgtagtctttcggaagcaaaaaaacagcggttttgtgaaaaagttcaggctcatgttccttcacccataacattttaggtaatgtaaacccttcaaggacacggttttttgtgatatcaagcagatgatcgccaaatgtctcggtaatcctgctacattgaggcgtcgttctggtatcattccaaagaatcgcatgacgcagcacccgccgatcttggtcaagcagtactaacccatgcatttgtcccgaatagctaatcccctcaatatccccggcttgaacgttggatatcgaaatcaattcagccaatgcttcaattgtttgctgcacccagtcttcaggattttgctcactatatcccgccttctcttggatgagcgggtaacttttggacgtttctgcacaaaccttgccgttttgattgactaaaatggttttaacggcactcgttccaagatctattccaatgacatacttcattttttcactccttcctctctaaatagatccccattggaatggcccgccattaacagtaacttcatgacgggcaattccgggaacttggctgcctgcatctttttacagcgggatctggagcttcttttttcattatacctgtaaaatgtattggtttaatatcgcttttaaccgctcctgtctccctgattcgtttttaattggctgattgttcagcgcatattgctcaagtgtcttaaaatcagctcttccttctgcaatttcaagaccaatcccttcagtaaagctgcggtaacggtgttgaatcacatcttcaaacacacgatcttcgattaatttgtgggcggctttcaaccctcttgcaaatgtatccatccctgcaacatgggcatatagtaaatcatcaggctcaaaagaagatctcctgacctttgcgtcaaagtttaatcctccgcttccaagaccgccattttgcagaatttcgtacattgctaatgtcgcagaatataaatctgtcggaaattcatctgtgtcccagcctaaaagcggatcaccctgattcgcgtcaacagagccaagaaggccatgcactctcgccatgcgtaattcatgttcgaatgtatgcccggctaatgtggcatgattggcttcgagatttaatttaaaatgattgtctaagccatattgctttaaaaaggcaatggttgttgctgcgtccgtatcatattgatgggtggtcggctcttttggttttggttcaatcaaaaactgccctgtatacccgatttccttcgcataatccactgccatatgcataaatctggccatattatcaagctcaaattttaaatcggtatttaacaaagtttcatacccttcacgtccgccccaaaatacatagttctcggcgccaagctcttttgctgtttctaatcctttttttacttgggctgcggcatacgcaaatacatctgcgttacaagaagtcgccgcaccatggacgaaacggggattcgtaaacatgtttgcagtattccataataacttaacgccgctggttctcatgtagtcttttatcatgtccacgattatatccagattttgatttgtctcttttaacgtacttccttccggtgcgatatcccggtcatgaaaagcaaaaaatggcgcatccagtttttcaaacagctcaaacgctgcatctaccctcgctctcgccagatccatgcctttatagtgatcccacggtctctgcatcgtagctgcgccaaaaatgtctgtgccgtcagcggtaaatgtatgccaataggcaatagaaaatcgcaaatgctctttcatcgtttttccgccaattacttcttgagaattatagtatttaaatgctaaaggattcgtggattctttcccttcgtaaatcactttgtttgcgctttcaaaatagttgactgaaccggaatgagagtgagccatgtgtgatttcccccttaaaaataaattctaaacatgatcattcaaatacagatgcttttatgtcatgttgcacattagtttgttgcccaaacaaactaacttattttcatcttatataacctcatcagtattttcaatattttttttagttttttacgaacacattagatataataaaggttggattcgctatgtactgcgttttgcacgataacacagaacgttcaacttaatttaaagattatacaaatggagtggatgaagtggatatcgctgatcaagcctttgtcaagaaagttaaccaaaagttattactaaatgaaatacttaagaattctcctatttcaagagcaaaattatccgaaatgaccggattaaataaatcaactgtttcgtcacaggtaaacacattaatgaaagaaaacctcgtatttgaaataggtcagggacaatcaagcggcggcagaagacccgtcatgcttgtttttaataaaaaagcaggatactccgtaggaatagatgttggcgtggattatgttaatggcattttaacagatcttgaagggacgatcgtccttgatcaacaccatcatttggaatgcaattctccagaaatcactaaagatattttaattgagatgattcatcactttattgcaaatatgccgcaatctccatacggtcttattggtatagggatatgcgcgcccgggctgattgacaaaaatcaaaaaattgttttcgctccgaactccaactggagagatattgacttaaaatctttcatccaagaaaagttcaatgtgcccgtttttattgaaaatgaggcaaatgccggcgcatatggagaaaaagtatttggtgctgcaaaaaatcacgataacattatttatgcaagtatcggtacagggatagggatcggcgttatgatcaacaatcatttatatagaggggttggcggattctctggagaaatgggacatatgacaatagactttaagggtcctaaatgcagctgcggaaaccgaggctgctgggaattgtatgcttcagagaaggctttagtaacatctcttcagacgaaagagaaaaaagtgtccagccaagatatcatagacctcgcccatctgaatgatgttggaactttacaggcattacagaattttggtttctatttaggaataggcctgaccaatattttaaatacatttaatccgcaagccatcattttaagaaacagcatcattgaatcgcatcctatggttttacattcaattaaaagtgaagtgtcatccagggtttattcccaactagacaatagctatgaattattaccatctatcttaggaaaaaatgcccctgctctaggaatgtcctccattgttattgatcattttctcgacatggttcataactgaaatgtacatacttctatgttttacgctcatctttaaagatgggtttttttattctaggcgtatttctgaatcaatactgacataggcactttctaatatgaaaaaggagttctaaaatagaaatctcctttttcatgtgctaattatttttctttataacgaaaatatctgaagtcggccgaaatatgatgaccgctcgtatcttggcattgcatccctacaaaagctcctgtaaagaatcccccgccgcggatgtaatcatctgataattttttcgattccaatgcaatgtcgattttgtgccaatcttctttgttaaatgaatacaaataataatatttttcgttttcaatattcacttttaaatagacatacttgacttcacgaggaatcacaattttattttttaatggctgtgaaaaagaaaagttatcacatatcgttaattcaagaatacggccaagttcttcatcatacgtgacttgaagagccgtccagttctctgtattgtaatagttcaccaaaccagcggcttgctgaaaattttccggataaaacgcaacagccgtttccgcttcaaaatggagactttgccagcgtctggctacaaatgcctgagtaaatgtcgaagttaaggattcatggccgtataatcgtaaatgatttggcacttgagttaatgatcctaatttctccgtaaacggaattcttaacgtttgaaaattaatatttaatgttgcatcgtcaaattcatcaacttccggatacgtgtcttcaaacattgtttctggtatagaaggcgcatccacttccaagctcccttcttttccgccttctacataaggccagccatctttccaatagagcttttgaatagctgtttctctgcccagaggacaatatcctctctgctgaaaaattgaatcatcgtccggatgaatgggacgtcccgttaaatgagctaaataccactcgcctgtatatgtttgtacaatggatgcatgtccgcatttttgcagcggattttccggcacatgccatgacgttaagataggattatcaggatgaacttcatatggaccctcaatatttgcagaacgggcaattgtagcagcgtgttcgaaccgcgttcctccttctgcggttaataaataataatagttcccgatatggtaaaggtgcggcgcttctgtcagctttctttcggttcctttaaatatcactttcggtttgccgattagtttttgctccttatcagaatattcctgcatgacaattcctccaaaggagtgccgatcaatacgctgatcccataacatatttaataaatattttttcccatccgtatcatggaacaaagaagcatcaaatcccgagctgtttaatgtgatcggctccccccaatcaccattaatcgtgtcacaagtcactaaataattgtgacaatctttccaggcgccatctacgaccttaacatccgtataaatcagccaaaactttccgtcactgtaacttaaacatggcgcccagaccccgcctgaattaggatttcctttcatgtctaattgcgatactctctgtaatggatgtgcaaccaactgccaattgactaaatcttttgagtggtgtatctggactcccggaaaccactcaaatgtagatacagcgatataataatcctctccaaccctgcaaatactcggatcgggattgaatcctttaagtactggattgataatcttcattttgaactcctcctcagctattttctgttgactcatcacgttttaagctttgaaatcgtcaatatgatccaaataaactttgtctctattctctaattctcgaaccatgcttttatattttttctcatctaagttatagaaattaatatcaatcatagccagaaccagtaagaacacgggaataatggttgttgtaattaaaattcccgtcaatgcctccggcgtttgcacctgatttgccacatatccaaactgatctaaaaccaaacccggtacaacccctcccaaggccatgccgaatttaaagaaaaatccgataatagcgtatatgagaccgcccattcttttcccggtcttatactctccatattctattgtttcaggaataagcgcccacatatatcccccggcagtgagacttccggcagcggcgattaatcgacagacaagtatgaggtatacattacttggcggaacaaacagtaaagctaagaggccgatcatattcagtaataatgcatagtttagtaatttcttcttccccaataattgatgaagctttggaataaacggtaaaatgaccaaagcaggcaaacttcccaacaaaccgtaccacttcactaaatccgctctttctaaattatacgttacgtaatagatgccaaccgaattactgattgaattcactccaaaaataataataaagaaaatacttaatacaactagaggccgattaacacgaaactgctcaaatatatccgaaaatttaattttttcttcggatttttgaagcgttacacgctcttttgtgcttttaaaacaaaagattaaaaggcacccgcctataactcccataatacccatggttagctgccagccaagagattcgctgccggaattatcgcttaaataagcagccagtaagggaacaaaaaatgcaacgacaagtcccccaagattcgcaaataacatacggacagacgttatactaacaacttcttgattatttctggtcattgcagatgttaacgcgccatatggcacgtttatcatggtgtatgtaagcgataagccgacataggtgatataggcatatattaatttccccatatccgaaaaatccggggttgtaaaacagagtattgccaatatgacaaagggaaaagctccgaataaaagatacggtctaaagcggccaaacctgctatttgttctgtcaactattgttccaataaaaggatcagcgagagcgtcgatgattctaaccactaaaaacatcgtaccggctgttgctgccgataaaccaaaaacatctgtatagaagaacaaaagatacgtagacactgttgcataaattaaattacaagcaaaatctccagacgcatatccaactttttcaaccatgctgatcttctttacgttttcactgagcatgatttctccccttttcgatcctttacataaggaacatgatgaatggtataacatttctttaaaattatcggccagtgagcggcatataaaagcgctttcaaaaaatgacagcggtttactttcacagagcattttcatcatccaaatggtgatcagatagcagtgaacaggataaaagcttggctttcgctttctatacacctccaattaaatcgagcctcttatcccctcccatttaagacctttacatgatggacaattaaagtggttttattagtttgttgaccgaacaaactaacttgatttcatattataaaatcttttctgctttttcaactcttttttcagagaatttaaaaccgatcaaaggacataccatgttgtaattgccgactgcttcgacagacgttaagtaaaaaccctctgtgtcacctgactgacttattaaatgataagcacttccatcatcttttgtttagaaaaacttattaagaaacatgcactagaaaaaatgcgaatcatatataagtgatatcccgtttaattggttgaggaggatatgatgaaacctatgctgccttttgaaaaatattttggggatttagaactggtttatacattttatggagctatgcctaccggtgttactgtttcagaaactggtcgtattttcatttgttttccgaaatggggagacgatgttaaatttacggtggcggagataattggggagaaattgcagccttatcctgatttacaaaccaatttggttaaccctgagaatatcaaaatgactttcatcagtgtccaaagtgtagttactgatggaagaggaacgctttgggtactagatacagcagcacccaatttttctgaaccaattaaaggcggggcaaaattagtcgctgttgatttaaaaacgaatacaatcagaagagtttatacctttacagaagatgttgtccttccaacaacatacctgaatgatgtccgatttgattttcgtgttggaactgcaggttatgcctatataacggattcttcttccaaaggaccaggagcgattatcgtcgttgatttggaaaccggaaatgcatgcagacggttaaatggaacaaatccaacttcaccggattcctattttataccgaaagtagaaggcaaaattttgatgaatcgtaacagggatggttcaacttccccatttaggctggcatccgacggtattgcgatttctcctgacggaaaggtattatttttttgtccactgaccagccgccatttgttctcgatctcaacagaagccctgagagatagaaatataccggacatggatttactttatcatgtggcgtattggggagaaaaaggtgcgtctgatggaatgattacagatgcaaaaggagccatttatgccggagattacgagaacaatagtattcgaaaaatactgccgaatggcacaatgcaaaccatcgcacatgatccgagaattttatggccggatactttttcgattggtccggatggatacttatacgtcatcgtgaaccaattacatcggcaggctagatttcattatggaaaagacttacgacagaaaccttatagtttacttcgtatcaaaattgatgaagctcctgctttttgaaaataaaaatggccggttccattttagagcataattggcttcatttagccttcatcctaaaccgaataagggattacaataaatacgtggcctcaattatggagttagattcataacttcaattttttttggtcatattttggtcaaggactaaaatatcgacctcttaatcttatgacaaaaccaaaaaatcccctgacaccaatagtgccaagggattgagagattaatactgagacatgtattgttcgcgctcccaagggtgaactaatgctgcacctgtgataaaaagaaaatcatttaacaaaagcagcagcatgaatgcgaatatttttttcgcgttttacaccgccttagaaagagaatgacgctgatttgatatatgagttcaggtctacttatagtgttcgccgcacaccgcttgcaaacaaacatcggacaatattttcaccctgtaatggccctttcgtatgagtaaagcaatgatctttcaaacaatgctgacaaagataattgtctcgtatcaatgcaagttgtcttgttcgtttccaatctattgatttataaaaaattgttattgttttgtttctttctgttgctgtgtcttgtgtgcatcacagtatcggtcacgggagaagctggggcatccaggggctgcgcatattcttagagatttacgtggcaataatatcacctctttaattgctaaaaaaatgctctttttaaagagcattaattttgtagatattttgttatattgtttatacaatgcgttccttttgaaatagcccaaccaacactgaaatcattcacacctaataaaccaagatcaatatctctattaattgttatgattgtttctatttcttcacgagtttttctactaattatattatttgcaactaaggagtttagtgctttatatatatcgccttctagtttaagctcttctttttgacaaagatcttcgacgagttcaaatattcttcgggtaattttatctaacttctcctgagaattaactggttctatgacagttaattcatctgagtcctctactttaaattttgttttgtagttggataagtcttctcttacatcttcacttacatctgaatttaaagacgttataaaatcttttggggtaatatgtgcaaaatccttaccagtttgtataaagaattcttcaattaattcacgccttgcaactatggggttttcattattatccttatagacccaatcactttttttatccccactaacaaaaaccacatcagtgtccagttgaagaattgaagaccatataataaaatctcctgaactattttcctctttaggattatctttatatcccggcggaattttatttttaaaacgtttttcagcctctttcatcagatcctcatcggtttttccatccggtgggaaaataatcgtctcttgtgcaatttccagaatactatccaagaaatggtcttcataaaaaagtttttttagatggtctcttagctcaactaatccatccttatattctttaagggcactatgatgattctcttgtagagtctcaatattcttaaggatatcttttccttcaagcatgggaacacgttctcttattggatttttgtctctttgtaacttagatatgacctggtctatatcattcattcgttgtttaatttcttttgttctattcttagaaaattcctttataacttgtaaaggaattctaagtctatcttcaccttttaatcgctgtaaagttgttaaaactttattaactgttacttctctccactgataagcggctagtaaaacgttagtatcaattacaattgtcgcatcttttagcaactcagaagctggttttggttgatataagtatcgtttccaatccttcattcataactctcctacaaaatttttcattcttatatattatcggttaagcatatcaaaaagaaaccaatcgcgaaatttgtcgaacgattccctttaaatcacatatttattctttctaaactgccaccgcactcaagccgttaaccgccaatagtctatcctgagatttaccggaatcagtttacagagaacatgaaaaagcaccctataaagggtgctgaatctataatgatgctttattgatttagaagccattttatacgttcaactgaagctatgtagtgtagtattattaaacaaaaaaagataatactaactgtttttaaatcactaaagtaaatcgccgcaacagctattgcgaagatcagtaattcaataatcaatcttataactccatttacggctattacagtttgaccacttcggcttggatcgttaggtactgcaaatacagtccaaattagcattgctaatatcggtaatactaaagttaaaacatatcttaaaaaaccattgaaatgactccaagcaaataacccgataaagattagtgcagcaacttcaagcaaaaatcttagaagtaaattaatttggttcaaattattcagctccaaatactctaattctttggtgactattacttcaaggttatttgttcaatttctttaatagattcttttaaatggtttgagcttttttctagatgttcaattatcccttgtaattcttcggttctttctttttcaaattcttctgatacagtattggttacttttcttaaagcaatgtcctcatcaattaatttttgtattatttttgaaagtctatacttctcttgatgtttcaatttcctcacctcccaccttattatcggttaaggatcgtgacaaaggagctatttgcagaatttgtcgaacgaaaaactactcaaatacatatcctaagaaaattcaatataagaccgtgaaaccttttgcaatcatctattaaaagatacactctattttgctttttattaatattaaggttcaaaaaaataattgaatctttatcttctttatttctaataacccgattattgtgcacaataatatttctaattctattccagtgccttattttattccattcaggtgtattttttaagtctctaacttgaacaaccttagttaaatacaaaacagctctttcaataccatttcctgatatatcttttagatcgatcttataaccatgttttgttttataagcattgcaaattaaattaagaaagtattcaaaatcaccatatattccagtaaataacgcactggaaacagaaggaattataatcggctctattaataaatgttcaccgtttgaattgtttctagcctcaacatcttcttttgttttttcataaaaatacttaaaggttgtttcgtaattctgaaatgtcgatgcaatatccatataaacagcgaacaagtcactagataaatcatttcctttacttacggcatcttgtacaaatgaaaactgatccaagttaatcccctcctaccttattatcaatgaaaggaaaggacaatggaatagtatgcagaatttgtctaaaaaagtttaggcaatctaatcttttacgcccttatgttaatcactttttaaagattgatctcacccatactccgagaggaagccaagtatagcaagatcgcacaatgaaacacgatatcactattctcccgatacggacgcctcagactagctgctatccaggttcagaatgctcctctcgttttggcttcattcctcaacacctttgttccgtatccgaattcgtcttgataagagaaagacgctttaatcgtatatttcgataagttttatttatcgcatttcgtcgataggttaagtttatcgagatttcaaacataaataatccccctttttgtcccctaaaatgtcccctgttttgtcgggaatttgtcacttagttttcgttttacacccaataaaataaataaaaaagagcagaccgaagtctgctcccttcaaaagtttatgatttgtcattatcagatagccttagaaccgtaatactcaataatattaagcctataaacgtgccgtattttccggtatctatatctgtgagtggagctacaatatattcaatcaggaatataataatagctattgagactaatatacgattcatttgacattaccgccttaataattaaccatttctccaaggtacaacaacaggggtaccaattatccaattataagaaattccgtactttccattatcggatactttttttatggcatacttaccagcaaacattgcccctgcaattgctccagcatatactgaaatcccaggtattttttttatcaatgctgctatcccggcgatagcccctgctataccgtcagcatcctcaacaatatctaagaattttttaattacacacgaattcatgctcaccttgactataggaattgctaccgaaacaccttgtttccctctacattttgctagagttgacatctcacttgattcatcagaaatattaactgtagcagaatcgactagtgttcgatggccatcagttaacaaatattgatcaactttaatcgactctttagaggttcctttatctagagttttttgatcaataaaatactgttttccgccatattcgattgtataagatgcttcaccttcagactgacttataacattcattccagaaacattggtttttacctttcatcgatgtcttagcataagaaggaagtgcaaatccgcagactaaactcaatacaagaagcaagcttactatttttgttttcaaattattatccttcctttaaggagactaacatagtcataatgaaaaatacaccatataacgttaaaataggaaatcccatctacacaactgcttactacaaaaagacactcagattattccgagtgctgtagcaatgcgaacaatggcacgctgttttatttcataacaggtgcccttcttcatgccgagttccatataaatatgaatgtctttcgtttggctggctgctaagtattttttctcaaggatcatgcgttcttcatcgtccaggctgttttctaacgccctttccatctgcttaaccttcagttcatttaatatgaaagaatctctgattgaaggaaacgggctgataccagcgtcaaccgattccttcaaaaatttaaagaaaagtctaaacgtggtttttccacaaaaaagaggttcaattggctgtagctgaaaaagataaacgaatggatcatcaaaacaaataaaaaacgagaatacaatatggagtttatcaatagcgatgacatacctttttttacgtgtagcatatgaatgaggattatatctccacaattatggagtaatttttttgtgggtgttttgtgggtgatacttgatttatattaagatattaaacttgttaagaaaccaaaaaatcccctgacaccaatagtgccaagggattgagagattaatactgagacatgtattgttcgcgctcccacggatgaacctgtgtgcggaacatatcccattcgatttcttttgcttcgatgaagtgttcgaacaggtgctcgccgagcgctgcaaccatgacttcgtttgatttgaattcgtcgagagcttccgccagtgtcgccggaaggtctacgatgccgttttccatgcgctcttctttgctcatgacgtagatgttgcggtcaatcggagccggtgcttcaagtttgtttttgattccgtcaaggcctgctgcaagcaatacgcttaacgccaggtacgggtttgccgccgggtctacgctgcggacttcaacacgcgtactgatgccgcgggaagccgggatacggatcagcgggcttctgttttgcgcgctccatgccacgtagcaaggtgcttcatagcccggaacaaggcgtttgtaagagttcactgtcgggtttgtgacagccgtaaagcttgtcgcgtgttttacgataccggcaatgaaatgttttgctgtttcactcagctgaagatcagcgtctttatcaaagaatgcgttaacgctatctttaaagagtgataggttgcagtgcataccggaaccgtttacgccgaacagcggttttggcatgaatgtcgcatgcagaccgtgtttgcgggcgatcgttttgacaaccaatttgaaagtttggatgtcgtcacaagaacggatggcaccggcatatttaaaatcgatttcgtgctggcccggagcaacttcatggtgagatgcttcgatttcaaagcccatttcttcaagctcaagcacgatatcgcggcggcagttttctcccaagtcagtcggagccaggtcgaagtacccgcctttatcgttcaattcaagcgtcggttcgcctttttcatctaatttaaacaggaagaattcaggctcaggtccaagattgaaatcgctgaaaccgagttctttcatttctttcagaatccgtttgaggttgttacgcgggtcaccttcgaacggcgtgccgtccggattgtaaatgtcacagatgaagcgtgctactttacctttttcagccgtccatgggaagattacaaatgtgttcagatcaggatataagtacatatcagactcttcgatacggacgaaaccttcgatggaagaaccgtcgaacatgcatttattatcaagtgctttttcaagctggctcacaggaatttccacgtttttaatcgttccgagaatgtctgtgaattgaaggcggatatactttacgttttcctcatttactaattttacgatgtcttctcttgtgtactttgccatttcgtaaaactcctcctctaaaaggtaaatgtatatagcaaaacagttgctaacggattaatgaaagaatcgggacatgtcaccttggcggaaagtatttccccgttggaaacggcctgcctgcatcagttcgtttttcagaagctttctgagttcgtcatcagacagatcgtgcttcatcggtttggcggttttttcggatttttcttccggttcggcagatgccttatccagaatttgtttgatccccgccatattgacgccttgttcaatcagatttttgatttctaacagtttatctacatcatggaatgaaaataatcgtctatttccttcgcttctcgctggaaatatcaatccattttcctcataatatcgaatttgccgggcagaaagttctgttaactgcatgacaatcccaattggaaataaaggcattgagcggcgaatgttatcactcatctcaatttcctccttttcttatcttagtctcattataggtgatgttatattttgtgtcaatacaatgtaaggaatcttaacatcgaattctttgaaaattgcaaacgacctagatcagctctttttccattaaagcatttacggcgctgcaaatcgcatttttcacgtgcgcgtaggttaatcctccttggacatacgcgacataaggcggtctgataggtccatctgctgataattcaatgcttgctccctgtacgaaagtgcccgctgccataatgacatcgtcttcatatcccggcatatagctcggataaggcgtcacatgcgcattaatcggtgaagcatattgtatcgcctggcaaaaagcgatcatcttatcagggtcctgaaactcaactgattgaatcagatccgttctcggcgcattccatgcagggtttgacgtaaagccgagcttttcaagaaaacgggcggtaaataccgctcccttcaagctttgcgccactacatgcggagcgagaaagaaaccttgatacatttcctgcagcgaataaagcgaagccccggcttcacttccgattcccggggaggtcatccggtaagagcaggcctcaatccacttggctttccctacaaggtagccgcccgttttagcaaggccgccgcccgggtttttgatcagggagccggccataagatccgctccgacgtggcagggttcccgctcttctgcaaattctccgtagcaattgtccacaaaaacaatgacatcttctttgatttcctttacgaaacgaatcatctcttcaatttcatttattctgaaagacggacgattcgcatatccttttgaacgctggatgccgatcacttttgtattcggctggattgcagcccggaccgcttcaaagtccactctgccttctgatgttaaatcgactgcattatatccgatttgaaattcctttagcgagcctgaatactccccgcctcttactccgacgatttcctcgagtgtatcgtaaggcttgcctgttatataaagcaattcgtccccgggtctcagcacaccgaagagcgcgattgaaatcgcatgcgttccggaaatgatttgcggccgcacgagtcccgcctctcctccgaacacatcagcatagatcttctccagtgtatctcgtccgatatcatcataaccgtatccggttgaaggcgtaaaatgcgtatcgcttactttatgttttctgtagctttgcaggactctccattcattccgttcactgatttcttctattcttttatgaacggcggagatttccgcttctgtttcttcggcggttttttgtaaaagagcgccgtgggtcagtgtgtcaaacatgttgtgtataccttccttacatgaatttcttcagttctccgagtatgctttgttcttcctgtacataacctgagacttcgtagcgttcattttcttcattaaaataaaggctgtcgatcatggtctctgatttgatgcgcgacatcaatttgccttcggcggcaggcacatgaacttcatacggcgtcatcagctcccgtcgcaaataagcttcgatttccgcttttagttttgcttcatccccggcgattctggcgctgatcatgatgtggccttctcccgctgtcgggatgaagtcaggaagtgtctcatcacgtttgttataagcggtcagcaccggaatatcatctgcctcaagctcttttaacagaccgaggaccgtctgttcatgtccggcataatcttcattggatgaatcaatgacatgaatgatcaagtctgcttccttcacttcctcaagcgttgagcggaaagcggcaatcagcgtcgtcggcagatcctgaatgaagccgaccgtatcagacaaaaggacgctgtagccgcttgggagcgccatctttctcgtcatcggatcaagtgttgcaaacagcagatcttcttcatagctgtctgagctcgttaattgattgaaccatgttgattttccggcattggtatacccgacgagcgcagcctgaagcacgccgttcttttttcgtctctcccgataacggcttctgtggcggataaccgttgaaagctgcacgttaatttcgtgtatgcggtttctaatgtggcgccggtctgtttcaagctttgtctcaccgggccctctcgtcccgattccgccgccttgtcttgagagattgattccttgtccgctcagacgcggcagcgcgtattgaagctgggccaattcgatctgaagctttccttctctcgtcttcgccctttttgcgaaaatatccaaaataagctgcgtgcggtcgatgatcttcgcttcaattgcagtggcgagtgatttaagctgactcggtgacagttcatcattaaaaatgaccagatccgcttcaagctcttcacacagcgccttcagctcgtctactttccccttgcctatatatgtagcggcatccgctctgttccgtttttgcgtaatccgggtcagcaccgttccgtcagccgtttttgtcaatgaagcaagctcttccatggaatgttcaaagtgctcatctgtcatgtgcggaagctggcagccgaccaaaatgaccgtttctttttttccttcctgttcgttcaaatggatgttcctttctgtgtcgtattgggcagtagtactatcataccaaacccgcagggcgtataccacacatccggcgggttttaaagagagaaataaaaaatagacccctcagaccggctgagaggtctattcgtgagctgccgcctcatcttttataagtaaatcctggctcttgatcgtcattaaatcgttttttaaatattggtctcccattaaaagtctcatggcctgagcgcggatcgatttttcaatcacgtttctgacaaagcgcccgttgctgaatttaatggggcttgtcgtgcttttcactgtcattaagtaatcttttaacttccactcggcttcctggcttaattgatactcacgctctgctatcatgcgctttgcgatgtccatcagctgagtgacagagtaatccggaaagtcgatgctgatagggaaacgcgattgcaggccgggatttaatgacaggaaatgtgtcatttctctcgagtaccctgccagaatcagaataaattcatgctgtttgtcttccatatgcttgacaagcgtatcaatcgcctctttaccgaaatccttttctccgcctcttgcaagtgagtatgcctcatcaatgaataaaatgccgccgagcgattttttaatcagatctctcgttttttgcgccgtgtgtccgatgtattcaccgaccagatcggcacgttccgcttcgatcagatgtcctttggaaagcacgttcatttcgaagaaaagcttgccgatcagtctcgcgacggtggttttcccggtgccggggttccctttgaacatcatatgaagagcttgttttccgactttcagcccttgttcggcccgtttttggttgacgaatatccacgcgtaaatttctttaatattgcgtttcatttcttccatacccactaatgtgttcatttctttttcaatttctttcagaatgctgtgtttggcttcatttttttgcagggcggcctgatattccgcctcagcttccgcatttgtcagcacttgcttttggccgttaagaatgatgttaatttgtccgttatttttataggttacagcgcgctccaacatgctcacctctctgttctctctttatcttactcatgatgaagcggttccgtgacatccgcctatcatcatgagacccgttttcctttttatctgtcactttttccgttctcttcgggaataatgttgaatcctgcgctttcccgagaaatatttttcatttcttattgtattcaacaaaaacgggaggacaaaccatttatttttattttccgggaaatgttgggtgtatttctcatttttttcatgaatgacagccgtacaagcaccttttgaatatcatcatatgctgtaatgaggtgatggagaatggttaaaatttttatagaccccggtcatggcggaactgattcaggcgcaaccggaaacggacttcaggaaaaagcggtcacgctggagatcgcgctggctttgcgcacgattctgacgaatgagtatgaaggagtttctgtcacaatgagcaggacaagcgataagacggtcagcctgacggaaagaacggatgccgccaacagctggggcgcagattattttttatccattcatattaactcaggaggcggaaccggattcgaaagctatatttaccccggtgtcggagcgccgacctcgacttaccaatcagccgtccacacgcaagtgattcaagcatcgggttttaatgaccgaggaaaaaaaacagccaacttccatgtgctgcgggagacaagtatgccggcgattttgacggagaatggttttgttgatacgtcagctgatgcaaacaaactgaaaacagtcagttttattgaaagccttgcaagaggacatgccaagggcttggagcaagctttcggtctaaaaaaaaaggctgacttatataaagtgcaaatcggtgcattcaaagtgaaagcaaatgctgatgcgcttgccgccgatgcggagtctaaaggttttgacgcgattgtgcttccaaaaggcggcttatttaaagtgcagatcggcgcattctcttccagagattatgctgaagcgttggcagcgcgggccgaaaaagccggatttgatgccttcattgtgcaagactaaatgaaaaaacccctgctctcccttttttgggacgaacaggggttttttgttattgaagtatatcggcgacaaactgagaccaagcttcaagacgctgatacacattttcctctttcagttcgctcagtttcatccagcgcccggcgatttgatctttttctttcacttcgacttgtgccgcagacgctaactggagcgcagaaaggatgccgatatgcaccttccctacatcgttttcatcatcattaatcaggccgagtgtgacaatgttttgtttgtcctcctcgcgaatgtacagttcttccgccagctcccggtcggtattctgtttcagcacttccgaaaatgaagccgccccttccatagggttcatgtgtccgccgaagccgagagaaagcttattatggaggcgtgattcccctccgcccgcgagccgttcatacacaaacacctcatcatcgcggcggatgacgacatacggaatcggctgtttaaatcgcgggtcctcttccgcgtcgcctcttctgatttcaaaaaaatgcgcctcaatttgagccataatttttacgatacgttcatcctcgctgttgactccctgaaatgtcagcatttcgttttgaaaaacgtcactccgcggtgcagccaagatgatttcatccattttattcatgcccgttcctcctgtcttacctctccactcaagccaaaagagcagatattatatctgctcttcatcttggccaaaataaaaatcttcgtccttaatcggttctaccgtcgcctttttgtagccgttccctttcatggagaagaaatcatgtgattttgttttggtgtttaatccgtttaatacgatcggattaatatcctcttcttcaaagtaaggatcgaaccctaagttcatcaaagctttattggcgttatagcggatgaatttctttacatcgtgtgagagtccgacttgatcgtacaagtcctctgtatattcaagctcattttcatataactgattcagaaggtcaatcgcaaattcacgaagctctgcttttttctcttctgtctgtttattataaatttcctgagcaaggagaccgacatacacgccgtgaatcgcttcgtcacgaaggatcaggttaatgatctcaccgctttgcatcagttttccttgtccgtagaaatataacggataatagaaaccgctgtagaaaaggaagctttccagatagacggaagcaaccatcgctttgaacagtgaaatttcatcgtctttttgaatggctttgtaaagcccgacaatcatttgcgcttttttctgcaaatatttattttgtttaacccattcaaatacttcattaatcgtttcagtcggagcaagcgtcataaaaatatttgaatatgattttgcgtgcaccgcgttttccatcatcgccatgaaattaagaaccgcttttcgctgatgaccttcgacgtgctcggccacaatcggcatgcccgtgttcccctgctctgtatcaagcagtgtcaggccggcgagcaccttcatgtacgtatcctgctcatttttacccaaatacttccaagtgagaagatcgccgtttaatgcgatctcttccggaagccaaaactgctttacgttttggttgtaaaacatttgggtgaaatcatcttcatgctttgaccagtttgctgcgtcataaatttttgtcactgtaaactctcctttaatcaaacgacacaagaaagacagctgtcctgcccggtatctttcgttcttgcatagtaaatggttttgatgcctctatggtgggcatacagatcaatacgattcagatcacgagttgtcatcgtatctttcaaaaacagggtaaagctgattccctgatcgatatgctgctggattgtcgcgatcatatccaccactttgaacatgtccatatcataagcttctttgtagaagaaccagttattagacgctaaccccggcatcgggtaatacgtttttgaatttccgtatgttctttcttcgatccgttccatgatcggcataacggacgccgtgctggattggacgtaggaaatggagcctgtcggcgcgatgcacagtctgtagctgtggtacatgccgttttcagcgacaaacgccttcagctctttccagtcttcgattgtcggaatgtgcatgccttcaaagagcgcagcgattttttcgtatgccggtgagaactctttttcgatgtatttattgaaatattctcccgttgcataagtggagccttcataatgctcaaacgtttcgcctttttctttcgcaagctcagctgaacgctgaatggaataaaagttcaccatcataaagaacgtattcgcgaaatctcttgcttccgggctttcatacgcgatgccgttttgggccaggtaaccgtgaaggttcatagcgcctaaaccgatggacttcatcgctttgttcgcgcgtctgactgccggcgcgttgcggatatccgtcgtctcagatacatgagtcagggaatccgtcgcgagtttcaccgtgcgctcaatcgatttatgtttcatgacattcagtatatttaatgaaccaaggttgcaggaaatgtccaagccgatttcatcttcctcgtcataatctgtgtaagctgaaacctgtgacgcctgaagcacttcagagcaaaggttcgagaatttcacttttgatacgtggttattcgcgtgctctttgtttacgttatcctggaacataatgtacggataacctgactcagaacggagaacggcaagcttttcaagcaatttgcgcgcattcactttttcttttttgacacgagggttgtcgacaagctcctcatacatcgccgtcatgtccatttcgtccatatgctggccgtattctttataaatcgtatgcggatagaatacataagccgctttatcctcacgtgcaagctcaacgaacttatccggaatgacgacaccgatagaaagcgtcttgacgcgcacatcttcatccgcagaaatctttttcgtatcaagaaaatcattgatatcgcggtggaaaatatttaaatacgccgcgcctgagccttgtctttggcccatttggtcagcgtaacggaacgcattatcaagaagcttcatgacgcctacaacaccttttgtggcgttttcaacatctttaatcgcttcgcctttcgcgcgaagcttcgacagattaagagaaaccccgccgcccaatttagacagctgcatggaaatatcgatcgcccgtgaaatatcgtttaaggaatcgttgacttcgagcaagaagcagctcaccagttctccgcggcgttttctgccggcattcaaaaatgtcggtgtactcggctgatattcctgattgatcatcagattcacatattcttttgctttctcagtgtcgccgtttgcgaagaacagcgcaacaattgagattcggtcctcataacgctcgaggattcttttcttgtcattcgttttcaaagcatagtcattatagaatttaaacgcactcatgaaggaaggaaaacgaaacttctttgcgtaagctgtcttaaacacttctttaatgtcttcaaaagagtaaaggcttaagaattcctcttcgtagtattggttttcaatcaaataatccagcttctcttttaaatcgtgaaagtaaactgtgttttgattgatatagtcaacaaaatagctatgtacagcctctttatctttatcaaactggaattttccatcttgttggatcatgatttcgttatttaactggatccattttggcacttgattttgtgacaactctttctacctcctgagtaaacaattcaacgtctttagatgtgccgctgagttcaaatttgtgcaagatcggcacctgatattgtcttgaaatggtatcggcgctttttgcaaagttatcgccccatactttgttgccgctcgcagcgactcctaataagagatgggcgtatttttcgagaaatgattgtgttgatgccggtacctggccgaagtttgtcgtgtaggtgaccaaaacaaacggagtgtccacgtggtccgtttcgtccaccttgcggatcagctggaagtctgttttattcacaaaacgctgaacattccctgtctttgaatcaaatatgatttgaaccatccttatcacgacctatcaaaaataatgaatctcttaacactatatatagtatactaacctctcagaaaaacacaacatattgagatcgatttataaaaaattcatatttttgaaagagcggactttggctctagcccgattaacgcccaaaaaagagagcagaacgagaatcatctctcatcctactcaaggtgtcatgtgtaagccgatgtctatcataacatgaaaaaaaactgcttagtagtctagacttttattcttattttttgtaagaatcacattttttttcgctttcaacggtttcttcaatctccacatcagcaccgatttctttcagtacggctttcagagcgcttgtgatggaagcctctctgatcagttctttgccgtcaacgatgatgctggttccatattcatagcaggaatcatcttcacaagtttcttcccaatggttgattatcaccttgtgtttcaatcgtctcaccctctgcatgatcaatgtcagtacttagtgtagcttgtgcggcccgctttgtaaattcgaacgcttgtgaaatttattcaagctcatccagcgccgtttcttttttcagttcgattctattcgttttttcatcatagcggtatatttttaagtaaccgtcctcaacgatgccgaaacgattatgttccagctgcaccatgccttctgtctgcggttcggtatccgccaagccgccgtcatcatccgtcaccaccgtctcatgattgctgcaagctccaaacagcaaaaaaacagcgatccaaacgagcgtaatcctgattcttctcagttcattttcactttcgaacacgattttccgaacccccttttatgtatccgatatacagcctgcaatatacagatgcgcatagaaaaagaccattgttcatggtctttttcaaaaagtctattcaagctcaagctggacgtttttttgcggggcgaacgtggagatggcatgtttataaataagctgctgcttcccctccgtttcgagcaaaacggtaaagttgtcaaagccttttacctggccgcgaagctggaagccgttgagtaaaaacaccgtgacgaacgtattgtcttttcggatttgattcaaaaactgatcttgaatattaatcggtttcatgtttcgtcctccttggttctcaatacaatactgtttcgattaaatttccagttttcctgctatgcactcgaaaatttccttttttttctgctcaatatcaacaggcggcgtcatatctgtccatgaaacgggcattttattgcgaaaccaggtcagctggcgtttcgcatatcgcctagaattttgttttaattgctccacagcctgaggaagcggcacttttccatcaagatattcatacagctctttatagccgatcgcctgaatcgattggctgtcccggatattcatatcatacagccgctttacttcgtcaagaaggccggtttccagcatcaggtcaacgcgctcgttaatccggtcgtacagcacttctctgtccattgtaagaccgataagaaccgcattgtaaagcagctcccgtttttgggttttaagatgctctgacattgtttttcccgatacatgcagaatttcgagcgcgcggatgactcttcgcgtattgttttgatgaatggctgtcgccgcttccgggtcggttgccgcaagcttggcatgaagcgcttccgccccttcttcagccgccagtttctccatgcgctcccggaatacagggtcaccggagttttccgtgaacgtatagtcatacagcacggactgaatgtacagacccgttcccccgacaatcatcggcagctttcctctatcggcaatctcggtgatttttccccttaccattttctgataatccgccgttgaaaaagtgtcggacggctccaaaatatcaatcaggtgatgcggcacgccttctgtctcttcttcggtgactttggccgttccgatgtccatccctttatatacctgcatggaatctccgctgatgatttccgcattcagcattttcgcgagtccgatgcttagttttgtttttccgactgccgtcggtccgacaagtatgacgacaggctgttttttatttttcaatatgtatcactctcttttataaatctccccctaattatagcattcatttcttcaggcacctatccattttgccctttttcctgagcgctaaacgtccactaccacccgatcggctcgtttccgacaacctctctcgtttttcctttgagtgtatggcggtgcgttttccgtccttcctcccgcggatcgtaaacgacgccgccgtgctggatctgaatcggctcattgtaggcggcaaaggtggtctctgaaagctcatggtaatgtgttccgtcaaccctcgggatggcagggccggaaatgccgtaatacctatgaaaatggccgttttcaaacgaggtgatgcccgtatagaaatgtgtatgctcatctgtattgctgccgttctccggctgcgaaaagccttcaatcaaatggtaatgcccctgcactacatccgtaaccgcccggtatgcgtgtgtgtgcggaggtttttttgaccaatcggactgatacaggcccacaaaagctcactcctttatttttttgataaacgcccaatcaaaaattggtgggctgaatactctgttatcatctcaaatttattcttggaggtaccttaattatgaatgaagaatacacatacgcagtagatagtgatatgagacagtttgggcggcctggatttgggttcggacgtcccggatttgggtttggacggccgggattcggcttcgggcggcccggattcggatttggattcggacggccgggttttggatttggccggccttggtttggttatggattcggacggccgtttggtttttacggcggaccgtttttcggagggcttgtcggggggcttgtcggaagcgctttattcaatccgtacttgtacgggggttacggctacggctatccgtattactattgacgaatcaaaaaggctcctccacgggggcctttttgtataggcctaatgtcttgacttggcgggcaaagttcggatattattttattttactgccttaaacaaaaggcataaggattatgatgagagggggatttgatatgattctgggttatatcttcctcacaattgctattttatcagagtcaatcggcgcggccatgctgaaggtctcccgcggatttacgcggtttttgccgagcgcgcttgtagtggcaggctattcattggccttttatatgctttcactgacactgaatctcattccgctcagcttatcctatgcaacatggagcggagccggaacggtgctcgcatccattatcggagcgaaatggtttcatgaaaaactggacaagcaggccgtcatcgggctctttttcttattggccggtgtcattttgatgaattggtagaaaggagaggcatgctgatgaaaggattactttgcttggcattagccattgtatcagaagtgttcgggagcacgatgctgaagctgtcggacggttttacgcacctgtggcccgctctcggcgtcattgccggaatcggagcctcttttatgtttttgagcttctcattgaaaagccttgatttatccgccgcatacgcgacatggtcaggtgtcggcaccgctttaacggcaattgtcggctttattgtttttaaggaagccataacgatcaaaatgatgatcgggcttgttttggtcatcacgggcgtcatcctgctgaaccgttccaagtctcaaaaagctaaaaaaaatcaaacggcccggagctgaccgtttgaactcgtcaagcgccggcagcttttacttcaacctcaagccccatctccacgtttcctcggaccgctcgtgaaatcatacacgaggactccgctttctgcgctaacttcctggcgagcgtaaagtccgtttcggctgcatccggctttaataatataaacggacggtgaatgattttctggtacgtgaacacaccgttcgtgacgtctacaattccttcagattccatatgtagatcttctttatccaggccgcttctttccatcatcgccgcaagcgttataatataacaggtcgcggccgctccaagcagcatttcatcaggatttgtgccttctccgggtccgtccatttccttaggaatggacacagccgtttccagccggccgcttttaatatcgccgacgtcattgcgatttccgggccaatttgcttttaaataaaagtgatgtgttgccaagggacaaacctccttttttttcagtttactcatcattcactgatttgtctttttttaagctcacgaatactcttgattgatcactctttttatcgtacggacaaaccggtaaaattcctccgtttttgtgaattccctttcgcgataatcaaaattatcaaaaagcgcttcccgctgttctctgctgatctcaagctgtatgctcagcccggtttgcgcctggttattgatattttcggtgttaaccccggccagaccggtttttgaggttgccaattctgcagaaaatccgtttcgttcgagagctctcaccaattttttcgcccgcttccgatcgcttcctccgacaagagtatttttctcgtcgcctttataaccgtgcactgcgataacataatggtgctgcttaatgctttcgactgctgaaggctcatcgaacttggtgctcgtaatatgaagagtctggttatcatgcgtttttaatccctcaaacagataggttgaataatcatcgctgaaagagcggacgatctcgctcaccccgccctcaattctccctccgtgcggcgacatgatcaatacggggctcccctttcgcttattgtacgatatatgataatcatcggggtcttcatgttcagccaaatctttaaaatctgtgtatgtatcagaagaattcgagggatcaggatctgacgcataatgagcacatcttattagtaagaccattgctacgataatgatgacattaagtaaaattcttttcatcagctctccttctttgctcctttctgaaaaatgacatgttcattatatggatttttgtcaataggtcttatcttaacattctattaacattatcatcagtgaaaaacttcccggtttcgaaaaatcaatggattgtcacggttcaagcgctcaaatgccgggcatcagtgaaaaaaggttgagagagggcaaaaaaaaagggaggaacgcccgaattttcaggggcgggagattcacagccggaaacggacggcatcaagaatacgcttttaaaaatgaatatccgcctcccgaagcaaatgcacaggacagaatggagcccgtcaaaaaagttctcacctgcctttttgtacagcaaaatgccgttacagcccgctcatcccctttttttatcataatggtccgttttgaaatggagccgtcttttttcatatatataatatcaatcggaagctgtttttccaaggaatgtctcaatattatgttcatgtatatacctccttccgccggcttcatcataaccgaacgaacgttctcttccaactcgatttcttctcctgaaaaagccgcaagtaaccagcgctcctgaaggacaaacaaactgaccgaacatacggcctgttcatatggtatagagagaatcgccagaatgggaggaaaagtatatatgtttggttactcaatggtacaaatggtgcggtcaaatgctcataagctggactggccgctcagagaaaacgtattacagttatataaacctttcaaatggacaccttgctttttgcacaagtttttcgaaaaaaaggtgaaaaacagaaagaaaatgtcagtcatcattgaatttgaagagggctgccatgaatccggttttcacagcacaggacaggtcttatcaaaagaaaaacgctgcaccataaaaaagcagtttcaaacaatcaattgctgcagcgccgaagtcactccgtccgcccttcacatgcttctttcgcaatgccgggatatccgtaaaatctatttaaaccgtgaagtaaaagcgctccttgatacggcagctgaatcgtctcatgcaaaagaagtgacccgtaacggcaccgtattaacaggaaaaggcgtaatcgttgccgttattgataccggaatctatcagcatcccgatttagaaggcagagttatcggatttgcggactttgtcaaccaaaagacagaaccgtatgacgacaacgggcacggcacccattgcgccggtgatatcgcaagcagcggcgcttcatcttcgggtaaatatcaggggccggcgccggaagccgatctgatcggagtcaaggttttaaacaaatcaggatcaggaaccttggctgatatcattgaaggtgtggaatggtgcatacaatataataaagaacacacaaagaatccgatcaaaatcatcagcatgtcactgggcggagatgcgctcagatatgataaagaaacggacgacccgctcgtcaaggccgttgaagaggcatggaataaaggaatcgtcgtctgcgtcgccgcgggcaactccggtccggaagctcaaacgatttcaagccccggtgtcagcgagaaggtcatcacggtaggcgcctatgatgacaatgatacggccggcaatgaggacgatacggtcgcttcattctcaagccgcggcccgactgtgtacggaaaagagaagcctgacattcttgcgcccggggtcgatatcgtatctctccgttctccgcgttcataccttgacaaattacagaaatcaaaccgtgtaggctccttgtatttcagtctgtcgggcacgtccatggccactccgatctgtgcgggcattgccgccttaattcttcagcagaacccgcagctttcgcctgacgaagtgaaaacactgatcaaacaaagtccggatcaatggacaaatgaagatccgaacatttacggagcgggcgcagtgaacgccgaaaacgccgtgccgaaagagtaacctttttatcatgagaacggggtcgtctgcaccggcagatgactccgtttttcaggtgaacagatgaaacatttataatgaaggaactcggaatgctttagaaccggctgtcagaaaaaaagatcaatgcaaggcagtgtatttctaaaaaaatagggaataagtatggtgtagataaaaggaggaatcacaatggcacttacaaacaccgaattgtctgaatggctgcaaaaacagatcggacaaacgcttgatatcagaaaaggagagctgacagacagccgaaacgagatttctgatatggaccagatcatgcttcaccttgatgatgttctcgtccgccggacaaatcatcccgatgactatgtagctgacgaagagctcgtcctaaaaggacacggcacaacctatacggaggaaggaaatgtcccgctccctcaagatgcgtatgaaatccctttgctcggcgacattaccatccaaaaggagcaagacggattaaaggtacatacagatcgggccgtttatacaatcgggacccggaaagagcaataaaaagaaaaaacgccctgaatcagcggcgtttttttattggtttttttcttcagaatatccgtggaacatcgtgaatgcgcaaagcataatgcctaaaataatgataatcggaagccagatcacggcaaacttataatccggttcggcaaaagcgcctatgaccgccccaaaacaatacagcaccaaggcaagcgcgcgcaaaacagcatctctcgtaaactgcttccgcttgtccgctttgtaaaaccttgcggtgagatcttcaaaaaaattagcgagcgttcctgttaatacggtcgtggaaatccccgctacaccaagttttctcgcggctgtcgtctgcattcccattgcgaagctgagcagcataatcagcacataaacagaaatggcatctgcaaaaaagcaagagaacaaagcaaacagcagcaaaacagctccttcaatagctaaagcggcagttaccgcagggggccagaatgatttctttttattgcccacaagcagggccgcggcaataacgccggcaataaatccgattaacgaggttaacgatttgagtacggcaaggtgccatgagttgccgaccgccaggccgaacagaacgatgttccccgtcatattggcggtaaagatatgtcccaggcttaaataaccgatcacatccacaattcccgctgttaaacaaagaagtaaaagtgcaatatttcggtatgtagtcactgtcaatgtgatccaatcctttctcatgctgattccaacatataagtttactctttgccatttcatatgtccagccggcgtgccgctttttcagagcataaaaaaactccggcgaaccggagaagttactgaacgataaataatactctcgtgccgtcggaatatccgctcatttgatttccaacccatgaaccggccccgcggttatccgacggggttacatatctgatatcagcccccgccccgccttctgtgcagactgccatgggccattcatcacggtcaaacccgggctttgtcggaattcctttcaatgattctttccttctattctccgctccgcccctatcaattgtacaaatctcagaatgacctgccgaaatggcgtcttttatatgatttcccgtctccggatattttgacagcgggaaatacagcacctgatcgtatcgggatgcggcacgagcagcactgtccgaatggatgccggcgcccgtaaggccgaactgaagagagatcaccaaaagcagacttgccgcccatttcataaacgcattcattcacatcctccttaagaagttgatatgaagcgtaaatatgtatattagccggatttaacacacatgatgaaatggcaaaaaaagtttgctgttttgttgataatcaacgaaaatggcagctttacgatttgtctattgaaccggcttctgtttccttatatattttagacatacttatgagccgttgtgatcagtgtcttcggcagataaaaggaggaatgccgtccggtcggcaggcaccggctgtttgttatgtcttttcaaaaacatgaaggcggggaaatccagatggaaaaaacaatgtttcacccacactcacccgagtttcacgaaaacccttttgcggttttaagcagattcagagagaaggaccccatacataaattcgaactgcagcgtttcggaggcacctttccggcttggctcatcacgcgttatgatgattgtatggcgtttttaaaagacggcagaattacgagagatgtaaaacgggtcatgccgaaggagctgatcgcgaagctgaatgtcagtgaagatatcgattttgtctcagagcatatgctggcaaaagaccccccggatcattcacgtcttcgatctttggtgcatcaggggttcactccccggatgattgagcagcttcgcaccgggatagagcagatcacagaagagctgctggataaaatggaaacaaaagcagaccctgatatcatgagagatttcgccgcaccgcttccgtttatcgtcatttccgagctgctcggaattccgaaagaagaccgcgccaaatttcaagtgtggacaaacgcaatggtcgacacgtcagaaagcggacaagatgcgaccaaccaggctctcaaagaatttaaacaatatatgaaaacactgatcgaagaaaaaagaaaacatccgggtgaagacttgacgagcaagcttatttacgctgaagaggacggccaaaagctgagtgaatcagagctgtattccatgctgtttttgttagtcgttgccgggcttgaaacaacggttaaccttcttggctccggcactctggcgcttcttctgcacaaagaccagatggagaagataaagcggcagccggaaaatatccagatggcggttgaagagcttttgcgttatacctctcccgtcatcatgatggcgaatcgatgggcgattgaagatttcacttataaagatgtttctattaaaaaaggtgaaatgatatttatcggcatcggttcagccaatcgggacccggaatattttgatgatcctgatacattaaatatagcgagaacaccgaaccgtcatatttcttttggattcggcattcatttttgtctcggggctccgctcgcccggatggaagcatccattgcctttaccgcgcttttaaaacggtttccgaatatagagctgaaaggcgcgcccgaggatgtaacatggagaaaaaatgtgtttttgagagggcttgaaacattgcctgtcagattttaatatcgcccccggtttatcgggggtttttttaatgtcttataaacagaaatcaatataacaatgaaaatttagtacatagtaaatttagttctatataaataaaaaagcggccggattgctccggccgttctctattaccgttttaccagctcatttgtttcgtccagtttttttctgaaagatttaaggaaatttgcgcttatcgttcctttgtttgcgtacagtttttcgcagaatgctttaatggcgttttgcggctttggttccgacagcattgtgacatgattggaagagtgaacgtccagcaggtgaaactgtttcatctggcgttcccattctttccaatacgcatcttggtctaacggaatttgttcttcctctgctgtcagataacgttcaagatctccgaggaacaaaccgcttttattacggaagtagtagcattgcagcgcttccggatgaggcagcggcttcatgtcatactcttccattccgtaagcgagctgcgtcttcatcatttgctccagctgcatccggatcgcttcttcggattttggcagaccgcgctttttggcaaggccgatcaattctttcaatatctcttcttcctcagcctggacggtaatgtcttctctgctgattaatgcctcttcaaggttttcaggcttaagatatgctgcaagcatcgtattgatcgtttgcagcatgactgacttaacagatggttttctttctttccatttttcactgtacggggtgtcgatcatgacggcgctttttaccgtatgaccttcctcctgcaagaggcgcgcggtttcgtatgcaagcattccgcccaaggaatatccgccgaggtcataagggcctttcggctgtaccgcttggatgattctcatataagaaacggcagtctcttcgattccttgcagcggctctttccctgtcaaacctcttgcctggatgccgtaaaaaggccgctgactctttttggcgaatggctggtatgcttccacgcctcccgttccgccgtgaaaccaaaaaacaggacggcctttttctctatcattcagcttgacgagttcgggaaaattccggcccgcctcctgcgattggttcgtttttaacagcatgctaatctcctgaacagtgctgcatttctgaagagcctccagactgatgcggctgtctccgccctcaagttttttcagcagctgaatagaggagattgaatcgaagccgtattcagtcagcggcttattttgatccatttccgctggctccatccccaaaatgtctgccacaatgtcagccgcgctcccgcggcagagctgaggctcctgtgaaaccaatgcaaggctgatgtcttctggctgaccgccgttccaatacttatggttttcaaaaggatatgtcggaagcggcactctttgaacagatttgccttggtggagtctgtcccacggtatatccgcacctttcacccagcaaaatgcaagcttttccagattattttcagccaacagcgtctctgtgacgactgtaccgagagtcccttccagtaaaacgccgatatctcctgatccagtctgctgactgcctgtaaagaagcttttcattccattgctttcttcggaaaatgctctgtactctttcagtttttccagcaattcatcttgattgcgggcaacgagtgccaggcgccagttcatcgcctcacggccggtctgaagcgtataagcaatatcccgcaatgacggagtatctccagtttgcacaaaatcagccagctgacctgcggccgcctttaggcgcccttcgctcttagcagaaagcacgataagctgcggttcatgcgcagattctttgtctttatggctcgggctgtactgttccaagacgacatgcgcattcatgccgccgaagccatagctgttaattgcggcccggcgcgggatcggtctgcccgtatggtcggtgaactgtgtccattcctgattgtcttcggtgaaacggaagcggcttttctgaatggccatttgctcatttgcagctgtaaatccgggaatacccgggatggtatgatgcttcatggccatcgccacttttataagggcagccagtccggaagcgagttcgccgtgcccgatgcaaggtttcacggtgctgatataacaaggcgcgctttcctcttgatttgcagactctccgtaacccgctttgattgcattaaactccagcgcatctgccatttcggaggcaatgccgtgcgcttcaatataagtgacggtttgcggatcaacttcggtgtcttcgtacgcttttttcatcgcggccttcattcccgccggattcggtgcgtgaagcgacatgcctttaccgccgtgagacactcctgttcctttaatgaccatgtgaatatgatcgccgtcatcaattgccgcctcaagcggtttgatgatgatcacgcccgccccttcgcttctgacaaagccatcggcatctttttggaacgatttcgcccggccgtttttgcttaaatatcccattgagtcaaaaccgataaagcccttcggcgattgcagaatattggcggctcccacgacagcctgctcacattcgttatggcggattgattgaactgccctgtgcaatgccaccagcgttgacgtgcaggcagcctcgtaatattcactcggtccttgtaaattcaaggcatatgaaattctgttcggaatgatggacggaatggctgttccattgttcggatcgctgttgctcgcggcaatgaaaacgcctgtcggtctgcttgataatgccttatttgtaaggcccgcatcctccattgccttccatgtatgcatcaaaagcagaaattgctccggccccatttgtgatgcctctttaggagaaattccgaaaaagagcgggtcaaattcgccgacaccgtcaataaaaccgccccatctgagactcgtgtcattctcatcaccggcgtaacggcgccagtcccagcggtccgccggaatttcggtaatacagtgatccccgtttacgatgtgctcccaaaaagactggatatccggggattgcggaaactgagctgacataccgataatcgcgattccttgcttgatatcggcgttatcacaaggcttatgctgtttcttcggtaaagtgcgctcttctgtttccgtgaccctggcctcttctgaatgcttatgatcggcaagcaattgagaaaacttgctctcatatgctgacgcgaagtggcgggtcagctcctccgcggtcggatactcgaaaaacaatgttggattcacatcgatgtccgcctcttggccgatctcttttgtcagcccgatcaggctcgctgaatcaagtcccaattccatgatatttgcgtcagaatgaagagatggcgtgggttcatccatcatcttggcgagcttgccaaggacgtagctgcggatatcatctgtcagactgccggcagaaatcggtgctcccgcattcttaacagccgttcgggccggctgatttatctgttcggttttcgggcggaaccgtttcagggcatagccttcaaaacgcatcaccacttccgatcgcctgctgatgacatctgcgttaatcagaatcatttcccccgtttgtttggccagcttgatgtgcagccagcaatcggtaagatcttccgggctgctgaaggtgacggaattaatgccgaacggcagatagctttccgcctccgtttggtccaataaagaaagtgaggccaagtaagcactgttggcgattaacggatttacggcataatgatgcgcttgttgtgagtcgctattgttcaggttcactttcgctaaaacgccatcagagcttttgtacaggcgggtgatcgttttaaattcttctccccacacgacggttcccgttccgtctccgtataactcatctatccggcccacttcccggtaagagcgctgaatggccgtcagatccgcgtgctgcttttgaaacggatacgggctgcactcggcatacgccgctatgctccaatcaggagacgtgcggctgcggtgcattatgctcagttcaaatccatccccgttttgtttcgattctgttttcagctcgatgcgatcgcctttttttacggtaatggggctcgtgtaattcagttttttaatttgtcctccttccgcttcaggaaaaatttcacaaaaatgatcgactgccagactgttatacgtagcgccgacgagtaccggttctccgctgaattgatgccctttcacgtatgggtcgtcatcactgtataccgactgaacgccggcagcgttttctgattcaccgaattgaaaagaagtcccgtggtcaaaagcgtaggccggcagatgaacggcgtgctcttgctgcaactgatcaaacgcgatattctctcctttttcccattgccgcgcacgccggccaatatcagaatcggagaaattgagattccgctgatccatgcggtaagcggacagcttttccagcagttcctgaacggaagcagccgtaaatgccgcccgatactccaaatgatgcgttcttttttgcagcgcggatgcgatggcggccggatgaagagatggcgtcttttctaaaaaagccgccagtctctcaagataggcttcaaaactccattttgttttcgctgacacagggaaaatatattcctcatcgccgtgacgggcctgatcggaattcgggctgatatattcttctacgatgagatttgcatatgccccgcctgccccgaaggaattgatcatacttctccgcggtatgatgtcccccgtttcggcatccttcagacgttcccaatactcggttttttcctgcaggtaaaaagccgtttgttcaagcgcgatattcggattttgcggttttgcgttaatcgtcgggactaatgtttcccgctccatttgcagcagcactttcgcgagctgggacatgccggaagccgcctctaaatggccgagatttgacttgacggatccaagcgcgcaaaaacgttttttatcagtatattgcgcgaacgcgtttgtcagggcaatgacctcaatcggatctcccaatacagacccgtttgccgctgattcaacataactgattgtttccggattgattccggccttgtcgatggaagccgccatgagcttcgcctgctgtttcggatccggagccgtgtacatctgccttccgccgctatggcacaacgcgctgcttttaatgaccccgtaaatatggtctttgtcagcaaccgctttggagagcggcttcaagagcaccgccccgactccttctcccggcatcaggcccgtgccggttccgaagcttttgctctcacttccctgttcaagcaaattagcccgttcgagcgcatcatatttagacggttcaagcgtgagattgacccctccggcaatcgccatggaacagctgttaagcttcaggctttcacaggcgagatgaatggcgctcagtgagctggagcatgcggtcgtaacgcccatgctcggacccgttaaattgaaaaagtgggaaatgcggttggcgatatgccaatcccctccgttagagctgagcgcggctttttccaatgacgggatattccagaaatattgattgtacatactgcccataaatacaccgatgccgctgtctgattcctgccattcgtttactctttctaacgagtaaccgccgttttcaaatgtttcccatacggtttctaagcttagacggagctcaggcgtcatctccatcacatggtcttcccggatgtcaaacaagtgatggtcaaaagcgtcaatatgctgcagaaatccgccgtaccgtgttttgcgttcttcttttcgtgtttcttttgccattgttttcagaagaccggacttccatctgttttccggggcttccgtaatacagctgtctccggcttttaaatgttcccacagctcatcgagcgtttcagactcgggatagcggccgctgatgccgataatggcaatgtcgtcacgatcagaatgattaacggtgacggtttctgtttccggctttggcgcttttggctctttttgttcagtgataaatcgccgcgtttccgtgacaagcggcaccggttcattcattgcaggttccggatgctccgtttcaggaggcgcttgttcggctccgaatgcctgttgcagcttatccgagtaattttccagcaaatactcggcaagttctttcgtattcgtgtgttcaaataagaccgtttttggcagctcgcccgtcaatgtttccagttcgcggataaaattcacctgcaaaatggagtcgatgccgtatttttcaaagctggtttccggctgaatgcgctcgggagcaagctttatggacttggctaacgtttcttttatgaattgcacagtccggtctgtgactgagaaaggcggttctgtgaaatcagccggctctttggaagccgcagtttcttcaaccgcctgcgcgtccggctgcttttgcctgataacgccgtcgctttctgccgccacgatctgctggccgaagtgatgtgacgattccgccataaatgtaacgtaccgatatccctcgctttccagcgcagactgccacgcttcaggatacagccccgggcatccgggaatgcgcagtttggcgtcttcatacagccaccagccttccaaaaggccgaatgtcaggtgagaataaaccgaatggctgctgatctcatttaatagcaaaatcccattctttttaagcaccgctttggcattgcgaagtgtccgccgaatattttttgtcgcgtgaagcacatttgccgcaattaccgcgtcatatgcgcccgcctctataccctgcaaagccgggggctcttccacattaaaccgcttataagtcaaatacggattgtcgggaccgtattctttttcagcatgcatgaaaaaggcctttgacagatcggtgtagcaatattctttcacatgatgtttgtactcttttaatcttttgaaaacggccgcgctcgtcccgcccgtccccgctccgatctctaatatccggatttccgcgttcgggtcttctttcaggcgttcttcaatgaaagccgtcaatgtgtcagcgagcacctcattaaagtagtctgccgtttcattgtttttatagattccttccaccaattccattgaggaatcaggaaacagaacatcagtggcagaaactctgccggataaaatatccggcaaagctctgagagcggtctccactaaggtgatcatcgcctctttgctgctgtccttgagtaaaggagctttcttttcatcccattcttgccacagcacgtccgcacgctctatcggacccgttaacacatacgtactgcctgactgtttcaaaaagcctttttgcaccaagatggagatgctttcttccagccacctgccgtaaaacccctgcatgacaggctgcgtttcgttttccgtaaaaaatccgacagatttcagctggcctgccaatagtttgtaaagaagatcttcagtgttttgcaaagccgtcccctccttaactcaattgttgtacatgtcttgttactttaggctgatagcttcgcagtttttgcatcgccgagccgtgatgttcagggtatacttctatcatttcttccggtttttcctccggctcttccgcctgtttcatcatgacgaactgattcaacgggccgccgagcaatcgttcaagcgccgccattgcttccggcgcttcaattgatccgactcccgcctgtttcatccgttcttgatagtcggcagatgatacgattccgacactgccccagtagctccaattcatcactgccgccgaatacggccgcgttttagccaaatgagcggcaaaggcatctttgaaactgcatccggcagcataattgctttgtccggccgctcgtgcaaatgattgaacagatgagaagaacaaagcaaagtccagcggctcatttcggaacacgcgggccatatttacgctgacattgacttttgcagcgagcacgcttttaaaacggctttccggcatatttgccaggctctgatcctctaaaacaattgcggaatggatgattccgttaatttgcgggtgcgtgcgtttgatcgtttcatacgcccgtgtgagctcattcggatttgccgcgtcagcttcaatataaatcggcgccgggccgaattggctgattctgtcaattttttcctggatagcgctgttatgttttcgtctgccgatccaaacgactcgcgcctgatatgttttcacggcatattcgctccatgcctcgccgatgccccccgcgccgccgatgacgacataaacgccgcctttttggtaagcgggccggcttgacaccggctgctgtacaggaataaggcgctgtttgtaccagtgattgttccggtacgcccatgtattgccttgctcatcaaacggcgctgagaacagctccgcctttgaaacatcttccggacatccggcatcaatcagccttgtttgccagttcggatactcttttgtgagcgagccgaccaaaccgtgaatgcctgcatgagccggatcaataatgtccgccggctgtacggactgtgtttttattgtgactgcagtcaagctgattcgcttgcctccatatcctaaagcaagcattgccttgatcactctgtacatctggatgacgcctgcatcttgagctttcaccatgtcatgagcgcggtgaaaaggagcgatccatacgatatgcccgaaagaccctgttgctttcagttcagccgcaacagcctctatttcatcctccgggttgatatgaagccgtttcgcagaaggatgatgcaattgaaaagccgcgctttcctcatcccccgcgataaagacaacctcttccgtcttatatgccgggctttgatcacggaattccgcgagatcccacaccggagccagaaggtttgctccatttaatgatgtttccggcgcggagccttccatcattctggaagaaatccctttaattctgacacagacccgtcctgtctcatcgcataagtcaatgtccatacgctgtattttttcatccgttccccgggagctgacatacgcccacatgcttgtcgtgcacgggctgaaaatgtccagttcttcaagggcgaacggcagtgacagctggttatcatctgcatgcagcttcagtccgattgtcgcttgcaaagctgaatcaagcatacacgggtgaagaacgtattgatctgccgtttcttcgaggaaggaaggcagccggagctcagctaatgcttgattgcttccgatatgaatctgctgaattccttgttgtcctggaccgtagtcaatgccgattttgctgaataagctgtaacactgttcagaagtcagtatactgaggccgcattgagctttcagtgcgcctatatcacggtgcggagcctccccggcgctgagaatgccggcagccccctgacagtgtatctgcctgccgcttgcttctgtttgtgagtccgtgtaaatgtcatacacgatttcaccgttttccctcgggttcaggctgatttgtgcttcaatcgggcgggttcccgcttcgatcggccgaacccaaacgatgtttttcagacgaatgacagacggacgttccttttgccctttgactgcctgagcaaccgccgccctagccatttccaagtaggcaacgcctggcataaccggcttgcctttaatgagatgatcgatgaaaatcgtctcttgtcccgtaaattcggatcggtaccgctgctctgttaaatctgatacattttcgtgaagcagcgggtgcagtacccgcgacgtcggcacagcttgcggtttctctgctttcggccggttgtccgtgatccagtaccgctctttcgcaaacgggtaagcaggaagactcatccgttggggcttgatatcagaatataagccgtcccacttgatatccgcgccctgcacccataattccgcaagcttgtcattctctcggcggcttatcagctcttcgatatccgcttcgccgtttgcgcctgccagaatggatttcagggaggttttacccgcttttcctttataaatgcccgctatatcataacgtcctttcgcacagctctttagcttgtcccgaagttcttcggccgaggaagcgataatggccgctctttcttccatcgcatcacgtccctgctgaagcgtgtaagcaacatcggcaagatccgcatccgtaaaagaagcttgcgccagctgctgcgcctgttcctgcagacgctcttcttctttggccgacagcacaaagatttgagggtgtgtgaaaacagctgtttttctttctaccttcgggatatattcttcaatgacgacatgggcgtttacgccgccgatgccgaaagaactgattcccgcacggcgcggcagatgattgccgttttcgtctttcaatgccgtccattctcttttttcctgtacgatgtaaaacggactgtctttcagcttgatatacgggttgatgacctcgctgtggaggctttttgcaagtgttttatgcttcatctgcatcagcactttgatcacacccgcgacaccggctgccagtgacaggtggccgatattggttttggccgaacccagaccgcagtgactcgcgtaaacggcggaatcgcctgttttttcgtacagcttttgaaaggcggatttcaggccgttgatttcgaccggatcgccaagctccgttccggttccgtgcgcttctatataagtgacggttctcggatcaatgcctgctttgtcataagccgttctgacgacttccgcctgggctttcgggttcggtgtcgtcaaggagttcgcgcgtccgccgtggttgaccgcgctgcctttaatgacgccgtaaatatgatcgcccgctttttccgcttctgacagctttttcaaaaacagaattccggcaccttcactgacggcaaatccgtccgccctgtcggagaatgttttacatttcccttctttgctcagcgcacccgctttgtcataagcgatgtggccttgcggtgtgacgacggtattcacgccgccggcgatcgccatatcgcagttcccgttttcaatggcgcatacggcgtgatgaatcgcgaccagcgagctggaacaagccgtgtcgatcggttcactcggcccgtgcagattgagcatatagctgacacggttcggccccgctgacggactcatatttgcggctgacgcaccgccgatatcaaggtcggaaaacagtgagccgtatccggtattccccgtgccgatatacaggcctgttttcgtgccggaaaggcttttagcggaatatcccgcatcttctatcgctttccacgcatacatcattaacaagcgctgctggggatccatctgttcggcttccagcggtgaaattccgaagaacagcggatcaaaatccgcaactccgtcaataaacccgccccactttacatttgttttattggcttcattaagcgggtcaccgtaatactcccgccagtcccagcgatccgccggcacctctgttatacagtcttttccttcttctaagttgcgccaatactcatcaatatttgcggccttcggaaacaccccgctcatgccgacaatggcgatcggttccggtttatgttcagccgcagtctgaacaggctgtacggcagtttttgcaaatcgtttgttccctgccagtctgatgccgccatcatcagtcacaccgctttgtttttcttctttcggctgtgtgctgccggtaaattgtgtttgatagtcttctgctaaatgatgcgccaaggcttgaatcgtcgcatattcaaaaaatacggtcggtgtcagatcaagctgataagtgtcattcagcttgttggcgaattccgtcagcgtaatggaatcaaatccgtattgattgaactccaattcgatatcgatttcttcaatgtttattttcagaagcccggaaacctcttttgccagcaattcctgaagttttgccgtcaggtctttcggcgcaggcgtttcctccgttttcttaaccggtgcaaaagcggctgcaggagtcttttgaagcagcttttcccgcattacggcgccgtttccttccatgacgagcacgcttgttttccccgtgctccatgctttgtaaagagcttctattccggtttcagtgcgcatcggcgttacgccggttcttttttcggtgagcttcgccatttcttcattgacttgcattccgccgtctttccaaagcggccaattgattgacaatgtgtgaccgtggcggtacattgcggtaaccagtgcgtttcggtatgccgcatagctgtccataaatgcgtttgccgccgcataatccgcctgtcccgcattcccggtgacgccggaaatggatgagaaaacgatgaaaaagtccagcgctaaatgctcggttgcttcatcaaggttgacaaatccgtccgttttaggagccaatacactgtaaaactcttcggttgttttctttgcaatatactgatctttcatcacacccgcgctatgaatgatgccgtgaaggccgccatattccgtctcaattgttttgaccaggtctgccgcagtttgagcgtttgttacgtcagcctgcttgtattccgcttttgctccgagtgattcaagcgattgcagctgcatccgctgattctcgcttaaagcggaacggcctgtcaaaaccagtgtcggctctttgactttccgggcgatttctttcgcgaaaataaagcctaagcccccggctcctccggtaatgagataaatgcctccgtcgttccacggaatgcgtattttgccgccggacacggccgtttctttgacatctgcgctgtatcggatgccgttttcatatttgatatggctgtcatcagcccgtgttttattttctctgatgatgtctgtgattctgccgttttccgccggttctatttcaatcagctgggttttcagttttttatgttccaggccggctgtttttaacagagctgaaatgcctgagagcagctgatgcttatctgttttagagagaaccgtctggataaggacgtcttccgtctcttccttcagcagtttttgcagcgtctccaatatccgtcctgtataatcacggaagcgcgccgccgctttcccgtgccgggaggtcatttcaatacattcagctcccgcggcttcaacggcttgttttgatccggcgtctgtgtcacaaagtattacgatatgccgggcaaaaaccggttccgtttgagcagcagtttcatcgcttcgggtccataccggctcaagcatgagcgttcccggagctttttcttttttctcaggttctttttcagccgttctgaatgacaaacctttcagccttacgcaaaccttgccgttttcatcacaaatatcaagatcacgtttttcaatctggccggctttgtggtcttcagaaagtctggcgtaaacccacatctcggcagcgcaggcgctgaatacttcaagctcctgaaccgcaaacggaagcatcagtttttcatcatttgttccggttaatatgcttgatgcctgcaatgcagagtccattaagcccggatgcatgacatactcctgtaccgtgtccgcactagccgcatcaagtgacagtctgcccaatacgaaatcatcacctgtataaatcgctttgacaccccggaaagccgggccgtaatcaaaaccgattttgcggtacatatcgtatacttcatctgcagaaaacggtgtctcggcggattgtgatctcagcttttggagatcaatgaccggagcctcggcgtcagggcggactgatactgccccttggctgtaaacggacggctgatctgtttcaaggccgctgtaaatgtcgaattgaacgtcatttgccgtttcaggaatgagacggatgttgacatgaaccggctcgtcttcaatggtgatcggccgcacccaaaccgtattcttaagcttgacgcttccttgtccggccggaacttcagatgcctgttccattgctgcgcgcgccatttcaagatgtgccactcccggtaaaatcggcacgccttttacaacatggtccgcaaggtaaaattcttctcctgtatagattgagctgaaccgctgttctgcaaggtttgaagtatttctgtgcagaagcggatgaagcgcgtcttgttttccggcagacacagtgcttgttttttcgtgttttccggtgctttttgccgcccaatagcggtcttttgcaaaaggatacgacggcaggctcatgcgtttaggcggccggtctccatacagcttcgcccaatcgacgttcagccctttgacccataattcaagcagcttcgcgtatttgccgcgtgccatccatttttcaacggcttcttgaatttcttcatcttccgtcagcatttgcagggtgcctttgtctattcttcctctgtacaaatccgcgtgcttatctccagtgataaactgtgacagtttttcctgcagttcttctgcggatccggcaataaccgccaggcgttcttccatggcgtcccttccgatttggagggtatacgccatagaaacgaggctgcattgatcgtaccgcttttctgtaagcgcacgtttcagctgttttgcctgctctttcaggcgtttttcatttttggcggacagaacgaaaagacatgggtcgatatgagaatcatctgcttcctctctgtcttctgggatgtattcttcgatgacgacgtgggcatttacgcctccgatgccgaatgagctgatccccgcgcggcgcggctgttcgtttccgcgttcgtccgtctgcgtcttccattccatcgtctcccgcaccagataaaacgggctgttttcaagctgaatgtacggatttaccgtctcacagtggagactttttactaatgtccgatgcttcatctgcagcaaaattttaataatgcccgctgctcccgcggcaagggataaatggccgatattcgttttgaccgagcctaagccgcaatagccggccgctttctcttttccgtctgcaaacgagctgaacgcttgtttcaggccgttaatttcaaccggatctcccagttctgttccggtgccgtgggcttcgatataagagactgttttcggatcaatgcccgcttttttgtatgcggctttaatgacttccgcctgttgtttcgggttaggcgttgttaaagatgccgcgcggccgccgtgattcaccgcgcttcctttaatgacgccgtaaatatggtccccatccgcctcagcggctttcagctttttgaggaaaaagagccctgctccttcaccatgggcaaaaccgtcagcctgatcagagaacgttttgcatcttccttctttactcagcgcgcccgctttgtcaaaactgatatacacatccggaagaacaatcgtattgattcctcccgccaaagccatgtcgcacgtcccttcttcaattgaagaaacggcatggtgtatggcaacgagcgagcttgagcaggcggtatcaatcggctcgctcggcccgtgcagattgagcgtatagctgacacggttcggtccgacagacggacttgtattcgccgcggatgacccttcaatctccgcatcggcattggctaaaagagaaccgtagccggtatttccggtcccgataaacacacctgtttttgtgcctgagagactctttgacgcatatccggcatcttcgatcgctttccacgcgtgcgtcagcaagaggcgctgctgagggtccatttgctccgcttcccggggtgaaattccgaaaaataacggatcaaattcagcaattccgtcaataaacccgccttggttgacgtttgttttattggcttcttttgcgggatccccgtaatagtcccgccagtcccagcggtctttcggaatctcggtcatgcagtctttgccttctttcaggttctgccagaaagattcaatgtcttctgccatcgggaaaatcccgctgatgcctacgattgcgatcggttccggcccttggtcccgctgcactgtctgcggaagtgtctcaggcagagtgcggcgtcgcttaacggccgggcgcgtgatttgagtctcttttaccggtcttgccgattgaaccgtttttgtatttaccgcaaaccgtccggcaaattcctcttcgtattcactgattaaatgaacggcaaattcatggattgtcggatgatcaaagaaaatcgtcggcgttaacgtaagccggtacgttttgtttaactggttcgtaaactcagtcatcgagatagaatccagcccgtattttgtcatttcttcatgaggatcaattttgtcaatgtttacttttaacagtgaggccgtctgctgttttaacaaatgcttcactttttcaagcaggctgtcagtatcaatgtcatgaactacagtggtctctgcttccggacgatcattctctttgcggaacagttttgctttcatgtgtttcacatctccttcaagaaccgtcatccgggctgtcccgctcatcaagccttgatataaagccttgatgccggcatctgtgccgagcggtgcgattcccgcctcctgcatcagcatatcttccgtctgctttcctgcctgcattccgccttctttccataacggccagctgacagaaagcgtctttccgtatctttgtcctgcggcttgtaaagaacggcggtactcggcatacatctccataaagacatttgcagacgcataatcagcctggccgacgcttccaagcacacctgataaggatgaaaagacaataaagacatctaatttctcatgttgtgacgcttcatcaagatacacaagacccttcactttcggagcgagaacgtgttggtattcctctgccgtcttcttcaccatgtagttgtcttttataatgccggcactgtgaacaatcccgtccagcttgccgtgccgtttgcgtatattgcggatcaatcggtatacttctgcttcatccgtgacatcggtctgctcgtagaaaacagaagcgccggcagcacgtactgtttccagcatgtctttctgcttttctctgagagcggaccggccggttagtaagatgacggcgtcttttgtacggtttgcgatctcttttgcaaagatcagacctaaacctccggcacctcctgtaatgagataaacgccttcgtctttccacggaatgtccggctccgcttgagaaatatccatctcttcccaatcagcggcaaagcgcttgccgttttcatatttcacatggacgcttccggcatgcatacggttttcggacgctttttccgctatgccttcagcactttctttctcttcggcttcgatcatttgacagatcagcttggattgttcaaggcatgcggttttgaagaggccggtaatgcctgagaacacctgctgtaagcctgctgaccgcgtaacagcttgaaatagaacgcggcccttcggcttgcttttcattatggttttgatatggtcaaacagctggcccgcataagaatgataccgctctgcaatagatgcgggacgatcgtccaagataatgacgcttgcatgttcaagctttgcttcgacagcttgttttacggcttcatcgtactcacaaaggaaaatgatatgctcttcatacgttggctcgtggtccgccggttccggctgctctttccagatcggttcagcgagcaatgtgtccgtacggctgacggaaacgccggcacccgcgttttcttccatgatccgcgttgagaaacctctcatccgcacacaaagcccgccgttattgtcatatagatcaatatcggctttttggataggatcgccggctttattgttcgcactgaatgtgacgtgcacccacatatcatcagcgcacggattcagaacgtccagctcctctaaagcaaacggcaatgcggctttgaatggttccccactttctgcaagcagcgctctcgtcacgttttgcaaatattcggcggcctgaagcgcaccgtccatcatactcggatgaaggatataatcagcttttgtatgagagacggattcaggaagcttcaatttagcaagcagccggtcttcgcctttgtatacaagctgcacccctttgtatccgggcccgtaatcagcaccgatcattcctttgtaaaacgcttgagattcgattgttccctgtgtgcaccggcgcttcagctgctcaatatccgccgcttcctccggttccttccgaatgatttcagcgatgccctgattataaagaggagcttcttcaccgatagaatcgttacccccgtacattctgtattgaatctgtccgtcctcttcttcataaagtccgatatggacacggacagcctcctgatcggctatcaccgggcggacccatacaatattctttaagcgcaggcccagagaatcctctgttgccccgccgatgcttttctccgccgcggcccgtgccatctcaagggtaacggcagccggcacgatcgccattcctttaatgatatgctcggcaataaaatactcttttcccgtgaattccgaactgaaccgctgctcctgcaagacggatgtattctgatgtaccagcggatgcaaaagtttggtatccgtttgcttcaccgtttcttccggccagaagcactcctctgcgaacgggtaggtcggcgcactgattctttgcggcggggaatcctgatacaataagccccaatcgacacgcgctccttcaacccagagtgccgccagtgctttcagcttttcatcccgtgtctgacatgccgcaagctcttccatctcctgagctgacacttctctgcttctcactttttcgccccgtaagatgttttggtcattgccattgatgaaatcctgcagctgacgcttcaaatcgtgacgatcatgactgataaaaacggctctctcttccatcgcttcacgtccggtctgatacgtaaatgccagatcatgcaaggaaacatcgttttcggcttcatccagaaagccggataaacaggatgcataggcagtaagacgctgcttatttctcgctgacagcggaacgatataaggcggctgtccgtcctttgatccgctgatcgttttgttttcatactgttcaaaaatggcgtgtgcgtttgttcctccgagtccgaatgagcttaacgctgcgcggtgcggcgtctctctctccggaagcggttttctcttatccgccacataaaacggcgaaccgctgaatttgatattcggattcggtgacgtgtaattaatggtaggcgccagctcccgatgatataaactcatggcgactttgatgcacccggccagacctgctgctgtatccaaatgtccgatattcgtttttacggagccgatcccgcaatactgctcccggtccgtgtaacgtttatacacttgctgaagcgcggacatttcaatcggatcacccaatgtcgttccagtgccgtgcgcttcgatataggaaatcgtctccgggtgaatattcgtgctgtctaaaacatgctggatgacgtcagtctgaccttttacactcggtgcgtaaaaaccgactttatctgctccatcattgttcagaccgatgcctctgagcatggcgtatatgtgatctccgtcctgaacggcttgtgacgcctttttcagcagaatgacggccgctccttctccgcccgccataccgtcggctgaagcgtcaaatgccttgacatgcccgtcgcttgaaaaattcaatccgttttggtgcacatagccgatgccggtcgctgcatgcagagttgctccgccgacgagcgcgtattccgattctccgctcgctatgcttttgtaggctgaataaagaccgactaatgatgatgagcaattggaatgaacgaaatagcttggcccttttaatccgagcttatgggaaaccatcgtcggaatcgtgccgctctgcgctaacacccatgacacatagccgtcgggagattcatggccttctgtcgttttttccggcaaaagcgaccgatacgaattattgcttgccgacatatatacgcttgtcttcggaatctctttcgatacatatcccgcgtcctcgacggctttccaagaatgaagcagcagaagccgaagctgaggatccataaattctgcgtctttcggagaaatgtgaaagaactcagggtcaaagagatcttttccttctatcgtcgataatgccggcacatagtcgggattttcgatcaaatcttcaggcacgccggcttcccgaagttcttcttccgagtagaaccggacgctttcctttccttctcttaactgcttccaaaactcatgatgatttttcgcgccggggaactggcaggagatccccactatcgccacactgtcatcaaagtaagacggcaccccgttttgcggtgtttgttctctttctctctcatcttggccgggcgcctctgattcagccgcctgttttgtttcaacaataaatcggctgatcgcctgaatggtagagtgttcgaataaatccgtgacggtaaaatcgcattccagctcctgtttaatgcgttctgctgccgcaacagccagaagcgagtcgcctcccacatcgaaaaagccgtcttcgattttgatgcccgccgtattcagcaggtcttcccatattgcggtcactttcgcttccgcttctgataacggcagtctgcccgtcttttcagaccggtgaacgattaccttgcgctgttttaggtctttgcggttcacttttccgctcggtgttaacggcagcgcatccagacggataaaatgggcaggcgccatataatccggcaggcctgataaaagatggttgcggagcgctttttcatctgccgtatgaccggcgcgggccgtataataagcaatcagctttttatgtccgttcttttcctgaaccacaaccgcctggtcaaggatatccggatgttcgctcaatttcgtttcaattgctcccaattcgatgcggaagccgcgaattttcacctgactgtcaatccggccggcatattctatatttccgtcaggcagccatctggccaaatcacctgtcttataaagtttttctccttcactaaacggattatcaataaatgatgccgccgtcagctcaggctgattgtaatagcctctggccagaccggcgccggccacgcaaagctccccggccacaccgtcagggacggggctgagcttttcatcgacgatataaagccgcgtattgtgaatcggtttcccgatcggcgtattcctgcttgtgatttccttttggccgcagctgtagtaagcggcataaatggatgtttccgtcgggccgtatatgttttcaattctggcatgtttgaagatggaaactgactttttgactaaatctttcggaaacgcctcaccggccaccatcacatacttcacagggccgtcttctgtaaatgccgtatgccgctttaccgtttccagaaatacattaaacacggcgggcgcaaaattcagatgcgtgacctggtgggtttgaatatattccatgcaaagctgcggatttttttctgcgccaggcggcaaaatgactagccgtccgtttccgataaaccagccgaataattcagaaatcgaaacgtcaaatacgtaattcgtttttaacagataggcatcctcttgagcgaccggatactcagcttccaaaaactgcagcgtattcatgatggccctgtgctcaaccatgacgcctttcggttttcccgtgcttccggacgtatatagaatataagcgagatgatgcggttttgaacgcggcgtcagttttgccccgctgacagaacgtccgctgttttcaatttccaccgtgctcacaccgccgatggccaactgttcaatcatgccgcgcgtcttttcctgcgttaatacgattgacacgccgctgtcagtcaacacgtgggccatccgttcatttggaaaagccgggtccagcggcacatacgcgcctcccgcttttaaaatggcgaggatgccgatgaccatctcaaaagaacgctccgtacaaatgccgaccgggcattccggtgtgacgcccttttcttgcaggtacacagcgagcgccgtgcttcgttcatctaattcgcgatatgtaaggctgttttcaccgaatgtgacggcttctctgtcagggtggcgtccggctttttccgcaaacacttcatgaatgcagcgctcattcggctgatgggatgaacggctttcatcccgtttttgattgagcaggccggaacaggcttcaaaagcgatctccggatcagaaagcaccttttccgccagtttcatataatgctccgccagccgttcgatgaaagaaggactgtagacatccgggttgtacagaaattgcaggacggttcccgtttcttttttatagacttcaagcgcaagctcaaattcgccttcctgatgaatgtcttctatcatttcaatgccgagtgattgatatagttccgccagcttttccgctccttccgtccggaagaagttttgatagaaaaacgcggtttgaaaaacaggcgacaccgcaggcgagcgttccgtcttcaattcttttacaagcgcgggaaacggatatgcggcatggtccagcccttctgccagtgtcagctgcagctccttcaaaaacgacgtaaaagatttggcgcccgtctccctgcttctgaccgcgatcatattaataaagtagccgatgacagactcaaattgagcctcagaacgccccatcgtcggcatgccgacgatgacatcttcctgattcgtatattgatagagcagtcctttgaaaatagcgagatacacaacggattcattgacgttatttttttgggcgcacactttaatctgccggttcagttcatcaggaagcaagcgttgatacgcctgccccctgcacgtttgaaccgatgatctcgggtaatccgacggaagctcaagcaccggcagcggtccttccagctgctttttccaataagagagatgtgtttttcccgcttcgctttccagcagctctttttcccatttcacaaagtcatgataatctgcggcctgctgaagcatgacaggttctttgccttcacttgcttttacataagcgtccagcagcgccgacataaacgtcataagagagacgccgtcaaaaatgatatggtgaatggtgattaacacaatcggctcccgcttcgcccgccggaatacttgaacacgcaggagcggcccggtttcaagcgagaacggttcttttgctttttctttaataaacgtaagcgcatcacgcccgcttaattcagaaagatccatttcttcaatcggaaaatgccgatccgtatcttctatctgatacggaaggccgttttcctcttttatcacactggtcaaaatagggtgctggcgctgcacggacaaaagagcgtttttgaatgtctcgatatccagcttttgaaaacgaaagcataacggaatgttatatgcgctcatctccggaaacattttctgaagcatccacaaacctttctggccttctgaaagcggacgttttgcagttgtccgcttagaagcctgaagtttttgttctacttcagcgatggtgagcgttcctgatctgtaggcatcgagaagttctttatgattcataggtcttactcccttctatgatgtcttgcactcttttaaaatctaatgtcccctcagagacctgtttcatcatggcgatgatctcctgatccgtatactccttgctttccggagcggcggcttctgtttcggtttcttccgttcggtaaaacgtttcgatcgtttctttatgttctgtcaggtaatagctcatgacgtctccgagcgtggcatagctgtaaaatagtgccggagtgacttcaatgccgtaatgactcgtcaaaagagcggcaaatttggctaaatagatggaatcaaatccgaattccgcccagtttttatgcaggacgagtttatctttggatattttcagcagactgtgtatctgctctttcaaatccgcttcgagccgtttttccgtgctttcttccgggatgcggcggctcacggtttccaaaagcgcatccggttttgatgaatcgtcccgctgtatgcctaaaaatcgttcagcacggcttctttcgccggcaatgacaaggcactgggtgttgtcttgagaaatgatgcgctcaaaaagctcaatgccttcatctgtttctaacaggcgctggccgcttgatttcaggtacatgcccgtcgtctcttcaccgccgacggccattccgccgtttttccagaccggccagtttatgacaaaagcgtttccgctttctgattgttcgtttttatagtgggcatacgccatttggaacctgttcgcgaccgcgtaatcacagcagccgaaatcccctaaaacagccgatgtggatgaaaagtagcagatgaaatccggcgtttcgtttttcagccactcgtcaagaagcaggcttccgtttattttcggttcaagcgtactgcggaaattcccgatttcattctcaaagacggatgttctgctttcgatgcccgccgcatgaatgacgccgtgaatggctccgaatcgttctttcgcgcgcttgatgcagtcgcccattccgatcggatcacaaacatcggcttcggcgtaaagaacacccgcgccgagattttccaggtctttcattttttctttcttttcttcattgatcggcgaccgccccgtgagaatgacatttgcctggtagttccgggcgagatggcgggcaaataagtagccgagccctcctaatccgcctgtaatgagatatgttccgccggttctgattctgctgttttctttcgtaagtccggttggttcggtgtgatagacgtatcgttttccctcttccaagaaaacggtttggtctgtttcagctttcagctcgtcccaaatggttctcatccagtccgttatggccgcaccggcttttctgaagtggccggtaacacttgttttcgggagaacaatgccgagcgaacgctcaaagccgatccatgattccaagtagcacctttccagaccggatgcatatccccccgccaataacagcctttccggctgcagaccggtctcagccattgctttgagaatatggacgatacatgaataatcttcgatgcagcttttatcttcaagcgcccataaatacaaaatggcagaagcttcaccgtactctttttgaatatccgcaaaagcgttcacatatgattgcggatcttcccgcaccacttggcagcggccggcggacagagcctcatatcggtctccctgagcgataaaaataacgtcaatgtcattgtcatacgatttgatcacagagacggcttcctgctgcttcttctgatcagataagaaagaaatcaccgttttgattttcttttctccggcagccggcagaacctgttctttaagaacttctctaaaagccattacttcaaattgttccgccggatcactttcatcagacggcgcgttaacgggcgcggccttgctttgtacaggctgctgatgccagaagcgttctttcgcaaacggataagcaggcaggctgatgcgggccggaggacggtctccgtataatttcgcccaatcgatgtccaatccttttacccaaagctcaagcagcttagaatatttccgtttgctgatccaagcgtctatgattgtttccatatcatcatccgccgaaaatacggcaagcatccgtttgttttcttccgtgccgtcacggtgcagtccggcgctgttttgtccggcgataaatccattcagtttttcctcaagttcatgaagtgaatggacgataaaaccgagacgctcttccatcggcacccggcccgtctggagagtaaaggctatgctcattagatcgctgccgctgtatcttttttcacggatggcgtctctgagctgtattgctttttcagtgagccgttcgctgtttttcgcggacaggacgatgatggcgggctgatctgccggcgtctcatcaggctctttatctgccgtatattcttctatgacgaggtgggcgtttgctcctcccgcgccgaagctgcttaaccccgcccttctcggaagctctctgccgccgatgacgggacgtttccactcaccgagctcctgctgaacggcaaacggcgtatacgcgaaatcaatattcggattcagctgttccgcgtgcagggacggcgcaatttggcggtctttgagctggaatagtatttttgtcagacccgcaatgcccgcggcgctttcacaatgaccgatatttgattttgcggagccgatggcgcaaaactgtttgtctgttgtatcctcttcaaatgctttcgttaatccggcgatttcaatcgggtctcctaatgcggtgcccgtaccgtgggcttcaatataactgacggtgcgcgccgggacgtttgccctttggaaagcttcttttattaaggcggcctgcgcattcggattcggaacggtgtatccgttcgttttgcctccgctgttaatggtgcttcctttaattacaccgtaaatgtgatcgttatcggcaatcgctcggtctaacggctttaatacgaccgcgcctaccccttctccgtctacaaaaccatccgcgcggtctccgaacgatttgcacgtgtcgcctgcggaaagcatgttcatgactgacagattcatataatggatcgggtcggtcactatgtttacgccaccggcaatcgcgcattcgcttgaaccgctgtatatgctctcaagcgccagatgaatggccgtcaaagaagaggagcaggctgtatcaacagcaatgctcggcccttggaaatcaaaaaggtaagataccctgttggcaatggaccaatagccgtagcctgtcgggtagtttttgttcatcgcgccggcaaaaacaccgatttttctgctttggcacaggttgtcaggcgtatagccggcatcctcgatactcgcatacgccgtttctaaaaataatcgctcctgcgggtccattcgctctgcttccaaaggagaaatctgaaagaacagcggatcaaacttgtccatatcctcaatgaagccgccccatttcgtataaatagagccttctttacctttctcttcatcgtagtaatcctgccagttccagcgttcccgcgggatttcttctatgcagttttttccttttttaatatttgcccaaagctcagccgctgtttttgcctgcgggtagcgtcctgaaacaccgatgatggccacgtcgcgaaccgaactttgccggacggtctctttggctgcccgtttttccctccgccgccagtcagtgcgaagcggcttagccggctgtacagcctgcggttctggtgatgccttccgttcttcctgaacaggcgtttgtcccgtcagtttgatcatcgcgtcttttttcgttttgattaagtgagcgacgagcgcctcaatcgtctgatattcaaaaaataaagtgctgctgacttggtccaatacatttcgtaacgcgtttgtcagctgtacgacgacgatagaatcaattccgtatttttcaagcggcgctttcggatcaatttgagccggcggaatttttaatgtttctccgattaacgttttcaagtactcggtgcttttttctgttaaagacgtgtcgcctttttgcaccgttgtttgcgcctgaagttccggcgcatgtactgcttttggcggagcggtccgttttccggcctttgcttgaagcgttttttggcgaacaatgccgttgctttttgccgctataatctgatggcttaattcatgtgccgcttctgccgggaagaagacagaatgccagccttcactttctaacacgcgcttccagctttccggatacaagcccgggcaccccggaatacgaagggcggaatcttcatgcagccaccagccttcaagcagtccgaaagtaatatgcgggaacaggctgtttcccgccatttcatttaagagcagcaaaccgttgtcttttaaaacggcttttgcgtttctcagcgtctggcggatgtctttcgtcgcgtggagcacattggccgcaacgacgatgtcgtatgcgcccggctctatgtcctggccggcaagcggcgcttctgcgttaaaaagcttatacgtcagataagggttccgtttgccgtattccgtctccgcatgcacgagaaaagctttcgatacatcggtgtaacagtattcttttatatggttttgatacggcctgagcttttcaaatatgcctgcgcttgtgccgcctgtgcccgccccgatttccagtatgcggatctcggcttttgaatgtttgctgatgttttctttcacatatgccgttaatgtatctgacagggcgctgttaaagtaatccgcgacttgattgtgcttataaattccttcaacaagttccatagaagagtgcgggaacatgatgtctgtcgccggcacgtcttcgcgcagaatgtccggcagtgctttaagcatcgtctcggctaaaacagtcatcgctttcgtatcggcgttattgagccattccgccttttcccgctcccatttttgccatagcgcggcggttgtgttttcggcgcgtgccgacagtgtaaatgaatccgcattcccttccagatagccatgttccagaaggaaggcgatcgtttgcttgagccattttttaaagtattcatgctcgggctcatacacttttaggctttgcggcgtcagcaagtccgcttctttaagctgggcgatcaaaagctgatacagaaaatcatcgagctcctgatgttcagcctctcttacaagacgtgcgccgggcggagcgaccttcggctgttgtgaaaagacaatcggctgaggcggataaacagaaatcttttctctttcactcatcccttcgactgcgaccggtttggtcgtatgaatgaaggctgcttgattaaccggcagcgtcataagggtttcaagcgcctccattgcagcgtccggttcgatcaatcccaatccgatctgatccatcagctgaataaaatcgccgtcttcagccgcttcgctgttaccccaatagccccaattcatcactttgaccggacaattccatgtctgatcaagttctttcgcaaatgcgtcactgaaagcgcatcccgcggcataatggctttgtttcacgttatgaataaatgccacaagcgaggagaagaagagcgcaaagtcaagcggctcccgtccaaatacctccgccatggacacacttacatcggcttttgcccgcagcaccgatttgaactcttctgtcttcatattatttaagctttgctcagacagatccattgccgagtggatgattccgttcatttttgtgtggcgctcttttatgaactgataagcccgctctaaggaagacctgtcagcggcatcggcggaaacatattcaggggccgggccgaatgcgctgagccggtcgagtttcgcttgtatggaatcattcagtgtgcttcttccgatccaaatgatgcgtgctttgtagcggcggatcatgtattcactccatgcctcgccaagatatccggcgcctccgatcacggcataaaccccgcctgtttggtacagcgtgccgtttttcggcatattgtcaagcggtatcagctgccgctctaacagctgctgattgcggtacgcccaaatttgaccgtttttcccggcagaaagactgagcgcctcttcgatcggccagctgccgtccgtttctgtgtcaatcatgcggatatgccaatgcggatattctttcgccattgttccggcaagtccgctgactgcggcttgtgacgggtcggcgctgccttgatccgaaaacggctgggcatttgctgtgacgatgcaccagtccaaacgtttttctccgtaccctaaggcaagtaatgctttcatcagcttgaacacatgaagaacgttcctatcctgttccttgaggctgtcagcactctcagcctgcggagcaagccaaatgatttgctccagttctttttgtccttcaagcatgtgcgtaagagatgtgatatcatccgtacctctgatcggataataggaagcgttcggcagatgttcttttatgtgcgtatgtctcgaatccgttccgccgaatactgccgtctgcttatccaccgctgcttccccggctttttcaagcgcaacaggctcccaagccggaatcagcatcgtatggccgacaggcgcctccgtggtttctccgcccgctgtttggcttgtgtcaagcgcccggacggacgcgcctttcatcctgacataaaccgtaccggcatcatcgcacatatcaatgtcaaattttcttacgttgtcatctgctttgctgccttctgtgtaccggatatatgaccagatatgttcagggcacgggccgaacgcttccacttcctgcatcgcaaacggcaaagaaagctcgtggctgtctgcatcgtcatgtatcgaacggacaagcagaccgacggatgcgtgaaaagcggcgtccatcatactcgggtgaagcgtatactgttcttttttgtcatgtacggctgctgggagtgaaatacgggccaataatcggtcttctccgagcagcaattgctgtacgcccctgtatgcctctccgtaatccagaccgatcttcttaaaagcaccgtaacattcttccgcagtcacgattcctaaattgcaggaagttttgacagactcgatatcaatctgggcgcttcccggttcggtaatgaccgcttcaccctggctgtgaatgaccggatcttcgccgttttctgcttcactgtatatttcataggtaatctcaccattatcttccggataaagggcaatatgtatttccttcggtttgtcttcaatcatgaccggccggacccaaacaacctgtctgagtgtgacgctgtggtctttttccgtcacggcagcggcctttttgaccgcctctgcggccatttccaaataggcgacgcccggcagtattttttgtccgttgacgacatggtcagataggaaaaattcatctcccgtaaaaagagacgtgaagcgctgctgcgaaaaatctgacgtattttcttgtaaaagcgggtgcagcactgtgcctgaaaggcttttctcctgttttttctgctgcggaatccaatagcgttcttttgcaaatggataagtcggaacgcttgttttacgcggtttatccgaaccgtacagcttattccaatctactgttttcccttctgcccataacgccgcaagccgtttcggatcgtccgtctcaggagcggcttcgctcagttccggcagctcagcttgtccgcgccaaaaaccggagatgttttcgtttccttttacaaaatcattcagcttttctatcaagtcgcgggtgtcatttacaaggaagacagctctctcctccattgcttcacgtcctgtctgaagtgtataagccagttcagacagcaccgtcttttctgaaagcgaccgggctaatttttccgcataggcgagaagcctgtctttatttcttgctgacagcgggatgagttttgctgcatcgttctcaggtacaggcgctttttgttcaggctgaatgtattcttctaaaatgatatgggcgttcgaacctgatgcaccgaaggaactgagtccggcccggcgcggataatgtgtgactttaccgttttcttcagctgccggctgcttccacggagcagtctgctgctgtacgtaaaaaggagatccctcaaatttcaggtaaggatttaattccgcagaatgcagtgatttgacaagcgttttgtgatgaagctgcagcgctgcttttgttaacccgctgatccccgccgctgattctgcgtggccgatatttgatttgaccgaaccgatggaacaaaattgcttatcctgcgtcccttggctgaacgcttttgacagaccttcaatttcaatcgggtctcctaacgaagtacccgtgccatgggcttccacataactgacggtccgcgggctgatacctgcttttttcagacaggccttaatgacttctgcctgtgcagcaggactcgggacggtaattccgcttactttcccgacgtggttaacggcgcttcctttaatgaccgcgtaaatgcggtcgccgtcttgttcggctttttccagcggcttgagcaagaccgcaccgactccttctccggaaacgtagccgtccccgccctcgccgaatgtgcggcagcggccgtcacttgagtgcatgcccacgcttccgtagctgagatatttcgccgggtgcagcgacaagttcacccctcccgcaagcgcggcttcacattcgccgcggcggatgctttcaatggccagatgaacggcggtcaatgatgaggaacaaacggtatccaccgcgatgctcggcccgtggaagtcacaataataggacactctgttggcgatctgcgcataattcagtgaaaccggaaaaggatcagtttcagataattgttctgcgccgattaaggaataatctttatgcatcacccctgcaaatacgccgatcggatgctgtttctcacctttatttcccagcgtttcaggcgtataccccgcatcttcaatcgtttcccagcatgtttctaaaaacaggcgctcctgcgggtccatcgtttccgcctcacgcggtgagattctgaaaaactgcggatcgaagcagtcggcatcgtcaatgaaaccgccccattttgatactgtttttcctgacggggacgttacgttgtgatatgttttccaatcccagcgggacttcggaacttcagtgatgcaatccgcgcctgccttcaggttatcccaaaactccgccacacttttcgctttcggatagcggccggccattccgataatcgcgatgtctccggtgtttttatgatattctggcgcgtccggcgcttcagcttcaggccgtgtcggttcggctgtacgttcctcacattcaaatgaaacggtctttttcagataggctgcgagttcttttatatttgtatattcaaagagaagagtgggcgcgaggtccgcacccgtctttttactgatatcttgtacaatctcaagcaaagaagatgaatccagcccaagctcgtagtagccggctagaacgtccagcgtctcccagggctgaccaagcttatcagccaaaagcttctttaaaaacagaatgatgtctttttcatctgcgctttccggctcagctgcagcctgttgattctgttcggctgtattctcgtcttcttcgagccgaaccgcttttcccgtaatgtttttaagctccgccaccttttgtccggatcggctgaagtactcgattgtcatcgttgtgagttctttttcctgacggacgccggaagcggcgatacgcgccgtgcactctgattgcagcctgtcggcggccgtgaacgattcataatataaaggcagatgaagccggtttgtatcagaaagcaaaccgctcgccccgattccgctcgcatccaaaagggccggatggaataaaaagaaatcctttccttcttcacaagaaagctcagccagcatgccgccttctgtttcgtacaatcgtccgttcgatttcatcatgccggaatgaaccaagtcatgatccaggcagcggttatacatgtcatcaagattcagagatctgactgactgcttcacatcgctgaaatcaatggtttcgtcaaatgtcacagcatctcttttcaccatttcagccgtcgcatattgtatatcgtctgacagctcgtcaccctgctgtttctgccccgaaagggagatgagccactttccatctccgctatcagaacattgaatggtcagaatgattgcagccgtttcactgacggttaaaggctgataaatcgtaacgtgcttcaattcgagctcattgtatacataaccgtgttcctgaaaaacctgataaatcaaatcgatataagcaagaccgggcaataccgcttcaccaaagaccctatggcccttcatgatgggatggtccagtgagatattgattttttcggatatcattccttcccactcctctctcatttaaatgctttccagaacatttttttcgcaggaagctcttgtttctccgccggtgcatcaggctcttttaccagagccttacgtcttaatgacggtaccggcagcggctttcttttcattcgggtatctttttcttcccaagcttccagaatgacgtgggcgttcgttccgccgtcagcaaagcagttgatggctgctgacggggctgcatcccattcgccggctgttttatgaaagtgaaaatctgtctttgttatatcaaaatgcggcatcggttcgtctcctgagagaaacggaaccgtttgtttatgcttcagcattaatacgactttaatgaagcttgcgatgccttctgcgcaaagcggatgcccgatgttcggcttgattgacccgatgccgagcggaacatgctgacctgagcggtatacggattgaatcgccttcagctcaagcaaatcagtcaccgcggaacccgatccgtttgcttcgatataagtgatgtcttccggctttttgccgcttttgaaaagcgcgctttgcatgacgtctttttgcgcctgcatattaggagctgacgggcctgccgttctgccgtcattgttcatggcggcggccttaatgaccgcgtgtatcgtgtcgccgtctttttgcgcctgtcttactgtttttaacagcaccatgccgatgccttcaccgaggacaactccgcctgaacgcttgtcaaatacgtgaaatgccggtttttcgtttaacagcccgcgctcttggaacatccggtgcgccgcatccgtgttcagcaggctgacgccgccaactaccgccgctttgatatcgccgcttctcagtgcctgaacggccatgttcattcctgtcaaagccgatgaacaagccgtatcaagcacgatgctcggcccgcgcagatcaaaaaattgcgaaacgtttgccgctaaataattctgcccgcccgcaacgatcgggttgcgggtattcgcaagactttcaggatcaggctgatgctggctgcggcctccgatatacacaccggcttctatgcccttgatttcttcacgggtatagccggcatggcaccaaagtttcaagctctcttccaacaccgccaacgcctgagggtccatcgctttcgcgtcgttttccggaatgaaaaagaattcggaatcaaagtgatccatattgtcaatcaatcccgcaacgtattgattttcatatccgaaacgttccgccgggacggagccgattgcggacctgccgcttctcagcaagtcccaatattggtctaacgattccgctcccggaaaacggcagctcattccgacgacagcaatgtcttcagttacggcatcacgcttttgttcagtgtgaaccgtttgtacggcagccggaaccaacatttctgtatcaggttcctccctttctgtaagcagcggctgcccattggatacaagccattcggcaaacgcgtcgattgtcggatgttcatataaaacagatgggtctaagtcctctttgagcgcttgattcatttgctgtaaaagctgcgctaaaatgatcgaatcaaccccgtaatcctgaaacggttcgtctgtttccagttcttccggagcgattttcagctcatcggaaaacagtttcacaagccacgccttcgtatcaagaagcaggtctctgtctgaatgtttttccgcggctttgccgtttattacggcttcagtctctttttgtgttttctcttgacagagcagcctgtcaggatgccattcgctccgatcaacgatagccggcagaacggacgggcggatgttttcagataaaatgcggtccagcaagtcaagtccttccgcgttggacagtcccagcagcccggtctgcttcaggctttctgtgcggacttcacctaatccggtttccttccagttcggccattgaatgctgaccagcggatattgatgctgatgagccgccgcgaaataatccatgtacgcatttgccatcgcataatccgattgtcccgctgcgagcgccggaacgactgcagatactgaagaaaataagacaaaaaattgcaaaggatcatttgtgaaaaggctgcttaatgtttgaagcccggcgactttcggttcaagcacttcttgtatgtcgtcggcagtctttctgataaacgccggatttactgaattaaccgatcccgcacagtgaatgacaccgccgatcggtcccatcgtgcgccggattgtttcaatttccgctgccgccgcatcatgatcagacaatttcagactgatcaccgccacttgcactccttttgcttcgagctcttcaatcgcccggatcttctctttcagcctcgtattaacggctgaccgttcatgacggggaggaatcggctccctgcctgtcagcactacttttttcaccccgtgtttttctgtgaaatggcgggcgcataagagacccagtccccttgtgcctccggtaatgaaaagcacatggtcttcaggaaacggtgcgggcttatgttctgctcgcttcctgcttggaatctccgtgaataaagcgcggtatctctgtccgtttcggcggcagatttccggttctgtgctgtccgccgaaaattcatctgcaatctgtttggcaagcgtctgctgatccgtatctgtatcggcatccatgtgtctggacgtcacgttttgatactcattttgaagcattctgtacaggccgctttttgccgctcctgcaagatgaatcgttttctgctgaaatggctccaagccttttgttacatatagcagcgtcagcggccgcgcttgccggcggcttgtatcaatcagagtctggagccggctgagctcttccagtgaagggtcttcgtctccgcatcccgtcagatcgattgcgccatctatgtgattccaattgctagctgcagtgtcagcggaatcgaccgggagaatgaatgagtcagcgaaatgcttcgcagtctcttcggctagctcagctgtccttgcatcagccagaatcatgaccgtcctgccgcttttctcaccggccgaatcgatctcacactgaacccattgcttttctagaaacacagcctcgcgccggtcttctgtttcctgcggtacggctttcggctcaggcagccagtacggctccttcgcaaatgggtaagccgggagactgattctgcggggtttttcgccttgatagagtctgtcccagtccatctgaagccctttggcccacaattccgctattttggcgtattttttcttatcgaaccatgaccttacgagctgcttcaggtcatcgtccgtttcaaatgctttgatttcttttttagccgttttgatatgggcttcatatatcccttcacccgtatttccgtttacaaaatcggttaaacggctgatcagttcttctctcgaaccggctgtaaccgcaagacggtaatccatcgcatcacgcccggtttgaagcgtgtacgccatatctgaaagattgatattctgattggcttttgcaaattcgatcacagactcggcataggtttttacctgaggcgtttttttcgccgacagcacaaaaatgtttgtctcatcaggcttacggcttccccggtctttcggctgatactcttcgataacgagatgagcgtttgtgccgctgtagccgaatgagctgacacaggcccgccgcggtgctccgcctgtttcccaaggtttgagttcggtattgacaaataaaggcgagtcatcgaaatcaaaatgttcattcggcgtgctgaaatgaagggtcggcacaagctgctgatgcttcatcgacagcagaaccttctggacgcttgctacacctgccgctgccgacgtatgcccaatattcgatttaaccgaaccgatggcgcaaaattgtttgcggtccgttttttccttaaatacagaagacagggcttctaattcaatcggatccccctgttttgtgccggtgccgtgcatttccgcataggtgatgctctcagggtggatgttgtgcgcttcatacacttggcgctctaaatccatttggcttttcgcgcttggtgcggtaatgccgttggtttttccgtcctggttaattccagatccgataatgactccgtaaatatggtcttgatcggcttccgcatctttcagcctcttcaaaacgagcgcccccgcgccttcgccaggcacaaatccgttcgcactgttatcaaatgctttacattggccgtcaggagacagcattccggcttcacacatgctgatgtatgattcaggcgttaaatacaaggtgacaccgccgacaagcgccatgtcaatttcatgattcaacagcgcctgacgcgccaaatgagtcccgacgagagatgaagaacatgccgtatcaatcggaatggccggccctttcaaattgagataataaggcaggcgggccgccgcgatgctgaaactgttgcccgtcgcgcttcctcctgtctgatgtttgtttaacatcatgccgtattcattgttcataatccccaaataaacgccgcaatttttcccgttcaattcttttgagctgtaacccgcatcttcaaaggctttaaaaccttcctgtaaaaatatccggtgctgcgggtccataagttccgcttcagacggagatatattaaagaacagcggatcaaactcttcaatgccgtcaagcataccgattgatctgcagtatactttgcccttcttgtttaaggccggatcatagtatttgtttacatcccagcgggaaagcgggatgtcgcgaatggcgtttttcgcacgggctaagttgtcccaatacgtctttaggtccggcgcatccgggtacttgcccgacatgccgacgatggctatcgcgtccgctatctcatctttaggctcccgtttggcctgcaccggttcaggttccttttgaaccgttaatctctcaggctcggcaggtgttttctcctgcagggcatgttgctgcgtaagcggctttggacgtacgggaaccgcctgtttttttctgccgcggacggacggctgcgtacgcagaaaatcggcaaattggcggattgtcggataatcatacactttcgttacgttacagtccgtgccgtaccgtttattgacggcctttatccattcaagaccggtaatcgaatccatacccaagtcaataaaggcctcatcaatatctacttcatgccgctccatgtacaatacatcagccagtgcttttgataactcgtcatgcaccgcttcaatcggttcttccggttcggcggaagctgccgtttcagacatcgcctccagaatatccgcttctgcttggattacctgctgtttataagtgtttaaaggctgcagcatgatgtttgacggttttttcacggcctctgttttctgcggttcggttgcttcctcaaggatcggttctgttccgagctctttttgcaagaaggccgcaaactggcggattgtcggataatcatatactttcgtcaccgtaagagacgtgccgtacgttttattaacggcctttatccattcaagaccggtaattgaatccatgccgatatcaataaatgtgtcgtctgcgtcgatatcgttggcatccatatataaaacgtctgccaaactttcggtcaatacggcacttactttttcagcggaaaccgccggacgggaaacagactgtacggttcttttcggtttcgcgccgctcaaaggctgcaatgaaatgtttgacggtttttctttggcagtctcctcgtgaagagttgttacttcaatgaccggttccgggacggccgccggtgcgatcggcgcagactgtgtgtcggccggttttttgacagctgcatctgctgatatgtcgatccaataacggtcttttgcaaacgggtaggccgggagactgattttttgcggtctgcccatttgatacagcttatcccaattcagcggaagacccttcacccaaagctctaatacctttgcggctttgcctttttcaagccatgcctcaatggttttttccatgtcctcatcagccgcaaacagcgccatcgtgtctttattctgtttgacttgtccgcggtagagctggtcaattgactccttgccgcccgtaaattcgtcaagcttctcttcaagctcgcgcaaattgctgacaatcattccgagacgctcttccatcggttcacggccgatttgaagcgtatatgcgatccggctcagatccacttcccggtaacgcccgctccgcagcgcatcaagaagacgttccgcccgtttttgaagccgttgctcatttttcgcggaaaggacgatcatcgacggatgaggcgcggcaaaagccgtctccttatcctcatcagcggaatattcttcgatgacgatatgagcgttgacgccgccggctccgaatgaggaaagtcccgcggttctcggcaattccttatcatttatgaccggtcttttccactcttcaagcgtctgctgcactttaaacggcgtactcggaaaatcaatattcgggttaagcgtccgggaatgcagtgacggcgcaagcttcttgtttttcatttgcagcagcaccttcgtcagccccgcgatgcccgccgcgctttcacagtgcccgatattggatttcgctgagccgatagagcaaaactgtttatcttgtgtttgttctgagaagacttttgtcagacccgtgatttcaatcggatcgccgagtgaagtcccggtgccgtgggcttcgatgtagctgaccgccctcggatcggttcccgcgtcttttaacgcctgtttgatcaccgcggcttgggcgttcggattcggtacggaatacccgtttgtttttccatcatggttcacggccgttcctttgatcaggccgtaaatatgatcaccgtccgcttttgctttagaaagcggcttaaggagtacggcgcccactccttcaccgggcacataaccgtctccgccttctccgaaactttcacatctgcctttgcttgataaaaatctgttctggccgagcatcaaatatttattcggatgaacggatacattgacgcccccggcaaatgctgcttcgcattccccgttccgcaagctttggcatgccagatgaatggctgttaaagaagaagagcacatcgtatccagagccatgctcgggccgttaaaaccgaatacataggaagccctgttcgcaattgatgacggatttccggtcagcgcaagcgattttccgcgcgcctgttcttctgctccgtaaagctgatattcctcatacatgacgccgacgtaaacaccgacattggcgccaagcaaatcacccgattttcccgtgagctttttgcgcgtgtaaccggcatcttccatcgtttcgtagacacattgcaggaataaccgctcctgcgggtccatcaattttgcatcccggggcgaaatagagaagaattgcggatcaaatttgtccacgtctttcaaaaatcctccccattttccgtacgtcttgccttctttatctttatcagcgtcgtaataaagactgtgatcccagcgatcgtttggaatttcggttatgcagtcagtgccttcactcaaattcttccaaaattcctgaagattttcggcctgcggatatcgtcctgatataccgataatcgcgatatcttcacgctccgtcagctgctgattttcccgcgtgtctggacggacttgcgcaaagccttttttgccttcattccgtttggaaacaggctttatttcggctttctcagacagcaccggtttggctgcaggggtttcttctgttttcatcccggtcacttccagcagcgtgtcccggtgtgctttcataaaatactgcgccagcgattcgatattctgatattcgaaaaacaaagtttttgataatgaaccgaagctcttttccagccggcccgtcaaatgcataatcataatcgaatcaataccgtaatcttccataggcgccttggcgtcaattttgccgacaggaagtttggtcacttccgaaagcacttgtttcaagaaatgctccgttttttctgcaagcatgttctctccaccagctgtaagacctgccgtttcttccgtttcgctgcccttatccggctgatcatccgctgattttttcagaaacgcccggatttttgcggcgtagccttccgtcaccatgacttgggatgtgtttgccgcccacccgcggtacaaagcctgaatgccgttttctgtttgcatagggaccatgccgctttcttttgtcagcatggcttccgtttcagcatcaaccgtcatgccgccgtctttccaaagcggccagcagattgaaagggtgtgtccatagcgttcatttcgggcttttttacggtttcttttttcactgaaggcgttcataaacgcattggccatcgcataatcagcctgacccgcgcttccggcgcttccggctccggaagagaaaagaatcagaaaatccagctcaatgtcctttgccgcttcatccagatgaaccagtccggagactttcggcgccagtacatcacggatttcatctttgtgctttttcagaatatagttgtcttttatcattccggcgctgtgtatgataccgtttaatccgccgtactgccggcagatgtcggctgtgagcgattgaacttcttgtttttccgtcatgtccgtttgtttgtacacggcttgcgcgccgagatcggacagttcttgaagctgggcttttttacggttatccaacagagaacgccccgttaaaataagaacggcgtcttttgcatgccgggcgatttctttggcgaacaaaaatccgagaccgcctgcaccgcctgtgatcagataaacacctttatccttccacggcttttcggcgccgaactgttcaagccctgtttcctgccattgcgccgtatagcgcctgccattttcatagcgaatatgcttgtcatcaggatgagcgctgcattcttttacatatcgtgacagcgtgtctgccttgacgtccggctccaattcaatcagctggccggtcaggttcgggttttcaagcgccgctgttttcaaaagccccgttaagccgcaaaggagctgcgtatccgcttcttgaggcacgacaatctgaatgagctcgcgcccgccggaatttgaagcgaggattttcttcacttcttcgaacgcctgaagcgcacaagcttcaaaccgttcgtcttcactcttttgctgatcacggagcatatgacagctgaagtctgtctgtatgctgttcatttgatccgtaaaccggtcagatatcatcacgtgacgggctttgaaatggatcggcgctttttcatgtacagcggccttctcttcccatacgtgttcaaaatatagtgtatctgttttatccgtttcaatttcccgtgcggaataaccagttattttcacacatacattgccttgttcgtcacatacatcaatatccagcttctgcacggcatcttcaggcttgctttcgccgctgtacgcaatggatacccacatatcgcttttacagcttttcaacacatcaatctgttcgagagcaaacggcagcatcgggcgtatgtcagtcccgtctctgtcaagcattaacccgattgtcgcgtggaaggccgcatccaaaaggctcggatggaggacaaactgatcttttgtatgagaaatagatgacggaagtgagagcttcgcgagcactttgctgtcttttgcatagatttccgtgaccgctttgtgagcatccccgtattcaatccccatctgtttgtatgcctgatagcaagcgtcaggtgtgatcagacggcgtgactctcttaatttgtcaatctcgattttggccggttcgcccgctcgcacaaacgccgcgcttccttgcgcatagagaacggactcttgttccgaggaagccgattcactgtaaaccgtaaatcccatgtccccattttcttcgtcataaagacggagatacagttctgcggactcatccgccgctgtaaacggacgtatccatacgacatgtttcagacggactgttccttcttccttcgtttctgcaacgtgttcaacggccgcccgaaccatttccagataagccgcgcccggtaacgtccgctcgtttttgacgacgtgatctttcaggaaaaattctccgccgctaaacgcagagcggaaacggacgcctgacatgtttgatacattttcatgcaggagcgggtgcagcatgcctgcatttttttgcgggaacgaatcttttttctccgccttcggcacccaataccgtgttttttcaaacggatatgtcggcaggctgacccgattcggtttgttttcaccgtataagagattccaatccattgttcctccgccggcccacttctcagcaatcatctccagacttccggaagaaagccatttatgtatcaagtccggagcaagctctgcctgtttgcttttatcagctcggttccgccagcacccgctgaccgttttacctgccagaaagccttccagccgctctttgagctgtgtcatattctgagcggtgaacgcaacccgctcctccatctgttcacggccgatctgaagtgtatacgccgcatcctcaagcggcaggccgggatgaataaatgcagacagcttcgcaacgtactcttttagccgttcttcattccgggctgaaaccggaaaaatgaatgtctgttctcctgccggttcatacgctgttccgtgtgattcttcagggataaattcctccagaatgagatgcacatttgaacctgtcgccccgaaagaactgatccctgcacgccggggatatacggtctcatttccgttttccgtcactgagggctgctgccactcttcggtaagatgctggacgtaaaacggtgattgttcaaaatctaaatacggattcagctcctcggaatgaagagacggcaccaaagttttatggtgaagctgcagggcaactttgcttaagccgctgatgcccgccgccgattccgcatggccgatattggacttcactgatccgatcgaacagaactgtttgtcctgtgtgtactggcggaacgccttgacaaggccttgaacctcaatcggatcgccgagagaagttcccgtcccgtgcgcctcaatataactgaccgtgcgcggatcgatgcccgctttgtccaggcattcttcaatcaaatcggcctgcgcgacagggctcggcacggaaattccgctcactgtccccacatggttgacggcactgccctttatcaccgcataaatccggtctccgtcttttaccgcctcccgcagcggttttaataaaacggcaccgattccttcagccggtacatagccgtctccgtctttcccgaatgtatgacaaaccccgtctgttgaaaacatgtcccataaaccgtatgtcagatatttattcggatgcagcgacaagttgacgcctccggcaaccgccgattcacattccccgcgccgaatgctttccgcagcaagatgaaccgcagtcagcgaagatgaacagaccgtatcgaccgccatgctcggcccgtgaaaattgcaaaaatatgaaactctgtttgcgatttgcgcataattaagagaaagcgggaatacatgatcttcagaagaagcttcagccccgaccaacgtataatccttatgcatcacccctgcgaagacgccgacgcgctgtctcttattccgtccgcgcgcctctgcgagcgacttcggcgtatatccggcatcctcaatcgtttcccagcatgtttgtaaaaacagccgttcctgagg

SEQ ID NO: 70 - DNA, 60987 bp, Bacillus amyloliquefaciens
ggaagcggcatcaccgggatatcaatccggatttgactctgaatgggaagaatttctgaagaaaaaataaggaggaagacaaaatggtcttaaaaagaataagaaatatgttcgtcgcatctgttaacgaagggcttgataaattagaaaatccgaaagtcatgctgaatcaatatgtgcgtgatatggaaagtgacatcgctaaggcgaaacaaacgattgtcaaacagcacacgatcgtccatcagtttaagaaaaaacaggaagatgcctctgaaacggcggcaaaacggaaaaaccaggctcagcttgcttttgacgccggggaagaggagctagcgaaaaaggctctgactgaaatgaaataccttgagggaaaagcggccgaacatgaaaaagcgtatgagcaggcgaaaacacagctggcagagctgaaagagcagctggaaactttagaaacgcgcctccgcgacgtaaaggataaaaaacaggcgctcatcgcccgcgcgaacgcggcaaatgcgaaggaacatatgaacgcttctttcgacaaaattgacagcgaaagcgcctacagagagttccttcgaatggaaagccgcattgaagaaatggaagtccgcgtcaaatacggcacttcagctgaggcgaacacagaatacagccgctcccaatattcagacgaggtggaagctgagattgaaaaaatgcgctcgctttctctggaaaaaacagagcgtcaaaaagcggctcatgaataatgtgcacaagggaagatcggcgcgtttacgcctcttccctatacgcacacgtatcaattctccggcttttcctttataataaaatgaatgaaaaaggatggaacgtaatgaagcgtaagattgccaaaggactgatggcggcgtccgttttgatctgctgtctgtttttggtgaaagaagtgtttgccgggcgtttttttccgctgtacgaaacagaagcggagtcggcaagcataccgccgcgtgccgtcaacagcctgtcggtttcatcggaacagacggatgtgaaaatcatcgcggaagcgcggaatgatatcgcggcaaacatgacgggaccggcggggaaaatgtttgtccaaagcaggggaaagaccctcaatctcaaagcgaaggagaaagggttccaatttctgaatctctttcagcgccctctgctgattgtccgcattccgtatgattatcatcgggatatcaccgtccatacatcaaacggcagcattgccgttgacggaaacaaggggctgtctcttgcgcacctcggcgtccgttctgtaagcgggaatatgtcgctgaagcacgtgaagacggatgtgtttgaagcgaaggggctgtcgggcaatctcacagcagcaggccttgcggcaaaaacgggggatgtccgcttatcctcgggacatgtcgggcttcaacatgtggcgggggcccttgacgtgcgggtcgcttccggcagtgtcgacgcctcgcttgagacggctgatgctcccgtatccgtcaggcttgcgagcggcagcgcagcgatcagcctgccgaaagacggaagttttacggtgaacgccgagacggcaagcggaaggatccggccgtcttattcctttgagaaaacgagtaaggaaggcggggcatttaccggcatgaaaggcagcggcgccaggccgattgatataaaagtgacgagcggcaatattgcactgcaatagtcaaggaaaggaggggcaagcagctgatggcaaaaaaacagattctcggacttatcatcgccttattaggcgtcagcatgtttttgcgtattatcggcatcggcgacttcttgttttggccgctcttttttctgatcacaggctatatttttaataaatattcccgcggctggctcggctccgtcctgtatatcttcgccgcttttttatttttgaggaacctgttcagcgccacctttaacctgttcggctatgccttcgccgcctttctcatctacgcgggctacaggctcctgaaaggaaagcgcgtctatgaacataaagagaagaaaatcaatcttgaaaaagaagagcagccaaagtcttccgcccagacggaaagcagacagccggacctccgcagcttttttatcggcgagctgcggatgatgaaggacccgtttgagctgaatgatttaaatgtttccggattcatcggcgatgtgaaaattgatttgtcaaaagcgatgattcccgaaggagaaagcacgatgaccatcagcggtgtcatcggcaatgtcgatgtgtacgtcccgccggatatcgaggtgtccgtcagttcatcggcttttatcggcgatatgaacctgctcggctctaagaaaagcggcatgagcccgaatctgtataaagtatcgtctgagtacggcgactcgccgcggcggattaaaatttcaatttcgttattcatcggcgatgtggatgtgaagtatttatgaggaaaaaattactcgccaatattcagtggcgcgccatgcggatgaccgcggggctcagtctgctcctttgcgcggtgtttattacgctgatgctgctgtattacgggcttgacccgatgctgttgttttcttccggctggttcggtattccgtttgtggtcatcctgcttttggcgtctctttcggcgggattgatttccggttatgtatacggcggccgcctgaaaacaagaatggatacactgattgaagcggttttgaaatttgaaaacggcaattttgcttatcgggtgccgccgctcggcgatgatgaaatcggtctggcggcagatcagctcaacgaaatggccaagcgggtcgagctccaggtcacatcgctgcaaaagctctccaacgaacgggcggaatggcaggatcaaatgaaaaaatcggtcatcactgaagaacgccagcggctggcgcgcgatctgcacgatgccgtcagccagcagctctttgccatttctatgatgacatccgccgtcttagagcaggtgaaagatgcggatgacaaaatcgtcaaacggattcgcatggttgaacatatggcgggggaagcgcaaaacgagatgagagcgctgctattgcatttgcggcccgtcactttagaaggaaaaggcttaaaagaagggctgattgagctgttaaaagagttcaaagcgaagcagccgctggatattgagtgggacatcagcgatacgggtgtgtcaaaaggcgttgaagaccatctgttccgcatcgtgcaggaggcgctttccaacgttttcagacattcaaaggcgaccaaggtcaccgtcaggctcggcgcgaaacatcaaaaacttcagcttaaagttattgataatggggcgggttttacgatggatcaagtgaaagcatcttcatacggcctgcattccatcaaggaaagagcgagtgaaatcggcggcatagcggaaatcatctccgtaaagggaaaaggcacgcagatcgacgtgaaagtcccgatttatcagaaaacaaaaggagagaacgacagtgattcgagtgttactgattgatgatcatgaaatggtcaggatgggtctggccgcatttttagaagcacagccggacattgaagtcgccggtgaagcatcagacgggcagcagggcgtcgatctggccgcagagcttttgccggatgtgattttaatggaccttgtcatggacggcatggacggcatcgaagcgacaaaacagatctgcgcgaaactcaatgacccgaaaatcatcgtgctgacgagcttcattgatgacgacaaagtgtatccggtgatcgaagcgggagcgctaagctatttgctgaaaacgtccaaggctgcagaaatagccgaagccatcagagcggctgccaagggcgaaccgaagcttgaatcgaaggtggcgggaaaagtgctgtcaaggctccgccattcagagaatcagcttccgcatgaaacactgacaaaaagagaactggaaatcctctgtctcgtcgcggaaggcaagacgaataaagagattggtgaagagctgttcattacgattaaaacggtgaaaacccacattacgaatatattgtcaaagcttgatgtcagtgaccgcacgcaggcagccgtatatgcccaccgcaaccatctcgtgacataagaaaaggagagcggcgccagcacactctcccgagggacggggtcattgggacattccctttgttccgaaatccctgatggcgactttgactttgtattcaatatccgattcactgaaatgatgatcccagtcagaggatatctttttccatttaccgggataatgaattcggacttgatcgcctaacccggtaatatccactttcaactcatgctgcatgtaatcaatgaatgccatgacatctgaatgaatgctgcgttttaccgcgtttttgatttcatttatataggactccttgaaagaatcttctttcgggttccaatcctcagacagacggccttcaacaaaccgggtgacgataaacttgaattttccatttttatattttgtttttacattatatttgctggaaaatacctcgaaggataaataatgattgtcatgctttgcaaacgtgacgcctccctttaccgtgcctgtgaacaggttcatattctggacttgtaaaggcgttaaattcgcataccagaatttatttttaataatggtagcgccccagatttccagtctgctgcccacttggcgcacttgaggaagggcaaaggtctcgcctttggcgattttctctgatatttcccccaatgtcacgggctccatcatccggatggtgaccgaattattctccgttaagtcatagatcgtatttgacgcaggttctccctggtcactgattttgaaaatatctttcgttttatccggcaccgtcatcacattgcagcttcttctcgtaccgttgtctctgataaattggttcatcaatgcgtcaagcggaatgtcgtcctttaacagcgcttcggaaaacagcatgatacgcaagtgctgggagaaagcggggtggttttttaacgacgccgtccttaaggcttggtgaacggtttccccggaagtggaagtcacctttgtcggattgcttgatgtcgactgctgggaacttgctttttgagggatcagaatctgctgcgtcacttccacgttttcttcctcaggtttatcgagcccgactccgataacgaggctcaagtcttctatattacggctgtcccagcatcccgtcaaaagcaatgagcaaagaaagattacgatgtatttcttcattgtgcttttttcaccttccttttcacagcgacgactccaaacatcagcaaaggcagcaaaaagaaaaccaagaagatatagccgagaatatcactgaacatcaacagcttgttgccgtcttttggcatcaatgatccgaagaatgtcgcaatccctacgaagatgatcccttttttctgcttcagcccgaaaattttattcaggccagatgtcgcgaaatacccgtacgagacataggtggcgaaaaattggatgatccagacaacaagcaaaaaggactcgaacctttcaataaaaagccctttgatttcaaatgattgaaagagcgcgatcgtaggccagatcattgttttgacatcctgggtggttaacgcgccgacgacgagaacgtaggtaatgatgtataaaataatcgggatgccaaagcccatggccgacatgcggaatgtgtgctttttatttttgaggtactcggggagaaacagcataatctcaattcccaagaaggaaacagaaacgacggtcaaggaagccataacgggagaaaaaccctgcccgagcaccggccgcaggttgtccagatcaaatattttaaagctgaaggaaaacaccaccagcaaaataatgatcgtaatcgttaaatagaaaggaaagagcctgccgatatcgctcatgccgccgataattaaataaacggaacaggcgataaagataaacagcgtgaccggcacgggcgttctttccaataaaaagaacttgaccatttccgccatcgcccgggcttcgaagctggcgactcctataaaatagagacagatcataagattgacgatatttcccgcccatttgccgagtccttcattcatataatcaaataatgatccgtactgatgctttttcataatgagcgtattgagataaatcaaaaagataaagatgacgccttccagacataacgcgatccagccgtccggcgaatttgcccttgctgacagcgcacgcggcatggtgaggagtcccgcgccgagcatcgtgtttgaaatcaatgctgtcccttgatagcttgtaagcttattgtgagttgttttctggctcatttatgtttttcgcctcttttggttgatttttaatagggagacggagaatagagtcgtttgcgttttttaagctgaaaaatccattcggcgagaaatacggagaaccgaagcttcgctgtctcgataaatgagtgtagatcgccagcataaataaaatcatgccgtacagcccgaaagctgccgcggtaaacatcgaaatgaaacggagcacacggaacgacagacccatcccgtactgcggcactgtaaatgaagcgagcgcgacaatgctgaccacgatgaccatgatggagctgacaatattcgcttcaacggccgcctggccgatgacgactccgcccaccaatccgatcgtctggccgagcgggctgggaagcctcaagcccgcttctctcagcagctctatcgtaatttccattaccatcgcttcaatgataggcgggaagggaacgttttctctgttcgccgcgatggtgactgcgagcgtcgtcggcagcagcccttggtgaaacgaaacgagggcgatataaatggacgaaaaaaacagcgtgataaaaatagatgtaaaccgcagcgcccggatgagcgaggcggaaatccaccgttcataataatcatcgggcgactgcattaaaattcctaaagaagccgggaccaccagcgcaaacggcgagttgtcgacaaggatggcgacgcggccgttgaacaaggcggaagagactttatcaggccgttccgtattttgtatttgcggaaagggcgaatacttattatcctcaataagctcctcaagcgttccggaatcctggatgtcgtccatcttcacttcgctgaggcgctttacaacatcgctgacgacagacgggtccgctttatcatctatgtacatgaccgtggcgtattttaacttattttctccgatcggaatctttttcgttttcagcttcggatggttcgtgcgctgcctgatcatggcgacgtttgtatcagaatcttctatgaaggcggttttcggacctcttacgaccttttcggatgtgggttcattcacgcttcttttttctctttttcccgtggacaaaatgtatacgctgtcaagtccgttaataaacacggcgcattttccccgcagaatggagatgacggcttccttcgacgtaaagacgggacgggcgtcgattttatcaagacgtttcgccaccgtatctagcgtcagagtgtcttcctcccgaagcagcgtttcaatcgcttcttttattttgtcttcgtcgttcatttcactcagatacatataataaaaaacaagcccgttcggaagcatctttttattttgaaccaggtcatcattctgctctacgtggggaagcaccagtgccagattaacgtgtatgtattccttgaattccgattgcgccatcgacagtcacccgccttccaatccttaattgaggttatcttttcctgttaaaaaaatgatatactatgataaagtatttaatggtacaagtttttttatgaaagcggaggagagatgtggcacaagtcagactggcaggaaatgccgaagaaattgaacagctcatcaaatcatttgaagcgcattacgaagtggcttacacgtcgaaagaataccgtaaaacaaatccgaagtataaatactctaaggattcgcgcgtctatcttgagctgaaattaaaaacggccaaggccgaaaaataaaaagggtttcatctgttactggcgaataatactcagggtgaagcaactgttatggagggatacataaatggactacagaattgaaaaagacaccatgggagaagttaaagttccggcagataaattttggggcgctcagacacagcgcagcaaagagaacttcaaaatcggttcagaaaaaatgcctcagcaagttgtgaaggcgtttgcaatattgaaaagaagcacagcgatcgcgaacgaacgcctcggcaacttagagtctgaaaaagcacaggcgattgccgctgtatgtgacgatgttttaaacggaaaatacgacgataactttccgctcgttgtctggcagacgggaagcggcacgcaaagcaacatgaacatgaatgaagtggtggccaaccgcgcgactgctttattgaaagaaaaaaattccgagctgaagattcatccgaatgatgacgttaaccgcagccaaagctcaaacgatacattcccgacggcgatgcacgttgcggcggttcttgccgtatatgagcagctcgttccggcgcttgatcagctgcgcgcgacgcttgatgaaaaagcgaaagcttatcaggatattgtgaaaatcggacgcacgcatttgcaggacgccactccgctgacgctcggacaggaaatcagcggctgggtatacatgcttgaccgttcgaaagaaatgattcttgagtcaacggaaaaaatccgcgcgcttgccatcggaggcacggcagtcggcacgggaatcaacgcccatccgcagttcggtgaattcgtcgcggaagaaatcacaaaagtaacggggcagacattcaagagttcgcctaacaaattccatgcgctgacaagccatgatgaaatcactcacgttcacggcgcgttaaaagcattggctgccgacctgatgaagattgccaacgatgtcagatggctggctagcggcccgcgctgcggaatcggcgaaatcgtcattcctgaaaatgagccgggaagctctatcatgccgggcaaagtcaacccgacgcaaagtgaggcgctgacaatgatcgccgcgcaagtgatgggaaatgacgcgacaatcggatttgcggccagccaaggaaacttcgagctgaatgtcttcaaaccggttatcatttataacttcctgcagaccgtgcagctgctcagtgacggaatgaattccttccatgacaaatgcgctgtcggtattgagccgaaccaagagacgattcaggaaaatctctctaactcattaatgcttgttacggcgcttaacccgcatatcggttatgaaaacgccgcgaaaatcgccaagcttgcccacaaagaaggcctgacgctgaaagaagcggcattacagctgaaccttctgacagaagaacaatttaatgaaatggtgcgtccggaagatatggtgcacccgaaagcataaaatgaaagaacggctgcagtcattgcggccgttcttctaaataaactgctgtttcagtaaaaatctgagctgttctgcatcttcagccagcaggtcggattccttcaaattcaaaatcattcctttgatgattgccggtttcggcgactttttcttcatttccgcttccagaatatccaagctctcggtaaattcagatgcttgcgccttgtccatcgtgccgatgcgcgtgcggagggtctgcaagatcgattgacttaaaggatcgggctgcccgttatgaaggggcccaaacagtgagcttgcctcatcaagagaaataaacgcttcatcatgtctgtccgccattccgtttacgatgtcatcaattctgtgaatcacggtatttgccagaagcgaaggctgtacggaccggccggtcagaatgagatattcaagatacatctgactgattccttctattaaaaaacaaagctcggctgtgtatggttcagctttttctccgtaaatagcaagaagactgtcgatatgaaactgcaggatcgaccggcggattctctttccgcactgcgccgcttcttcggtataaggaagtgaaccgtctttcatctgcacggtaataaaatcctgatgggcgagaatcgattcgtaaaacaccgcaagctgtttttggtaagcggctctcggactgtcaccctccgtttggatcgtcgtgattcgggtaaacgttttatcatagtagtaattcagcatggatagaagcagtgcttctttggaaggaaagtaaagataaaaagcgccttttgagattttgcattcatcggcgatttcctgaaccgatgtagatttgtacccttttcgggcaaacagttttattgctgcttcaatgatcagcttttctttttccttcaatggttccaccctttcggagccaggaggctggcttgtgcttctcatgtatgactatatggtcatattgatattccgtaaatttaacctgattgtaacttgtttttttgttttgttttatttatattataaagtgagctgaccgaatggtcaaagttctggcgaaagggtgaatctgaaaatgaaagaattagatgaaatgatcagccgcttgcgaaacagaggaattaaagtcgaaaaggtgaaatatccgaaaaagacaatttgtgaaaagaaatgggttcatcaatgccaaaaaccgctgaaaacaaactacagagattttaacggctactccttcacataaaaaaaagactgcaatgaaacactacagtctactttggtatgataattcggtagattacacccgattggtcattttcaattgaaattgatgctttatgcagggttaaaatccgttttacgatgctgagtcctatgccgaactcgcctttcttccctttattaaaaggctcgtacaagctggatagcatctcatcctcaatcggaggcccgtcattttcaaccgtcatgacaatctgctgctgattttggctgatccgaatgtgaatcgccgtctctgcatagcggatttgattttcgagaatgttttcaagaagtttgctccattgttccggatcaccgggcatcattaatgcatcttctgtttcaacggtccacgataattccttccgggcccatttgagccgttcaatgacttcttccgtgaccttcacaatgtcaaatgtctcatggtgcacccgctgcttcattaaataatcaagcttcgttaaatataataaatccttaattttcttctcaagtttttctgcttcgccttcaatgacatcaattgtggtttccaaatcccccttaggaaaaatcccgtcctttattgattgagtatagccccttatcaccatgacaggcgtttttaaatcatgagagatattttgcaggagcgttctttccgtttcgtctttttgcaccagcttgctccgcatgtcttcaatggtatggcctaattttccgatttcgtcttttctgtcgacgatgaccggatcatcccaatcctgttttgaaatccgtttgacatgcttctctaaggaaacgagcggccgcgagagatatttggcaagccaaatcgccggaatccagcttaacaaaatcacgccggcaatgataaagagcagctgcttgaacagggtgaatgccagatcatcacgataagaatcaagggcgtaagacagcatcatcgcatcctggccgttaatggtgaggccttttttaatgacgaaaaacactttttccccgctgatgtccgcgctgtatcgtttcgtgacgctgtgctgacggcccgcgagcttgtacaccttatggataaaggaagaagaaaagtagttcaagtctttgtcactggccgattcctcccgttcaggcagaagaacgtgctgaacggatcggaaagtcgtcggagcggtcgcatcctcgctgtaatatccacgctcgatcgatccgggcagccggtactccgtcagtacatgctgttcattttcaatggtcgtatacgtttcatccgtgaaaaaattacgcagcgtatttgagaacagcacgagaagcagaatcgaaatggctaagaggatgcctgagatgaccacccatatttgaaaagcaagcggcttatttttcatgacgtcatcatcctgtagccgaatccgtaaatggtctcaacctttagcccgggcattttttttctcagcctccgcacaagatcatcgaccacccggtcagtgccgaaataatcatggccccatattttcagcagaatgtcttccctggaaaaggggtgtcctttatggtgaagaaataaaagcagcagatcaaattccttagacgtcaaattgaccaggctgccggtttcatcataaacctctcgggcgtcttcgatcacattgtaggaagaaacggtgatgccggtttttttgggagcgggctgttctttatacacgagctggagcagcttctggacccgtataataagttctctcggcaaaaaaggcttggcgatataatcattgcttccaagctctaacccgaggactctgtcaatatcggcatcccgcgcggaaatgaaaatgaccggcacatcgggatctttttcttttatttcttttatcaatgtatagccgtccgtatccggaagcatgatgtcaagaatccacaagtggggagacggctgcatctgctttctggcatcttcgccttttgtgaaagatgtaatgttccagccttcattctctaaatattttgtgagcagttcattcaggttatcctcatcttcaactagataaatggtgtatgacaaggcatttcacatcctttcaacgtcattatactagttttaacacactcaagccgcattttcataatttcacatattcttttcatttttatcccacaatgtttgtttatgatgtgtataagggaagaaaggaagaaaaaaagcggggaagataacatgttcaaacacattttgttttggagctttgcttttctccttattattgggacaatagaatttgtacatgcgatgaatatgtaatcgatagaatgaaaacatgctgaaggagtgtgcgtgaatatgaatgatcatcgagatgacggcagaagccgcgatcagtcagatctttcacatacggaacaaaacagaaatgaacagcagcggatcagccatcaggagcccgagctgcttgaagagcccgtctcgaaagaagcggaaaacgagacggcggccggtacggaatttgaaaaaacggctgccgtgaaaaaagaaaaaaaacggagagctgcttggctgagcccggttttaggcggcattatcggcggcggcctcgtgcttggcattgtgccgaacctgccgagtgagcagcataagacagaagccgtttctgatacgaaacaagttcagtcttcgaattttacgtcaacgcctttgaaaaatacctcaagcgtagcggatatggtggaagatttggagcccgcgattgtgggagtgtccaactaccaagcttcgcaaagcagccagttcggacttgacggcggttcaagctctgaaacggagagcggcacgggatcaggcgtcatcttcaaaaaagacggcgaaaaagcgtacatcattacaaacaaccatgtcgtagaaggggcgaacaaactgtcggtcactctttacaatgggaaaaccgaaacggcaaagcttgtcggaaaggatgccatcagtgacttggccgtattggaaatcagctcgtccaatgtcaaaaaagcggccagcttcggggattcctccaagctccgcattgccgataaagtgattgccatcggcaacccgctcggccagcagttttccggcaccgtcacacaaggtgtcatcagcgggctgaacagaacggtagacgccgatacatcccaaggcacggtggaaatgaacgtgattcagacggatgcggcgattaaccccggaaacagcggcggcccgttaatcaactcaagcggccaggtcatcgggatcaacagcatgaaagtcagtgaaaacggcgtggagtcactcggctttgccattccgagcaatgatgtagaaccgatagtcgaccagctccttgcaaaaggaaaagtcgagcgcccatttttaggtgtgcagatgattgacatgtcgcaagtgccggaaacctatcaggaaaacacgctcggactgttcggcgaccagctgtctaagggtgtttacgtaaaagaagtgcaatccggctcaccggctgcgaaagcgggcattaaatccaatgacgtcattgtacaattgaacggcaaagatgtcggcagcagcgccgatatcagacagatcctatataaccagctgaaaatcggcgataaaacgactgttcaagtgctcagaaacggaagcaaaaagacgctgaacgtcacattaacgaaacaaaccgaaagcgcaagctgaacgcataaaaaaagctgaaccttcaactgaggttcagcttttttcgtcattctcccaagtaggctgacagcatccacacgtgcttgtccgcttcttcaactaatccgacaaacaggtcggcagttgacgggtcattttgttcctcggcgatgccgatgacaaattttgattcgcggctgatttgtttatagtcttgaaccagtgattccaccatttcagaagccgttttttcctggccttcatccgtaatggaagcttgttcaaggtaagtgtgtaaagtcgccgcaggctgtccgccgatggccagaagtcgctctgcgatggcatccgccgtttccgccgcttcgttatacagttcttcaaatttttcatgaagcgtaaagaagtgagggccttttacataccaatgaaagcggtgcagtttagagtaaaggataaaccagtttgataattgtgtgttcattgatttctcaacaagagtttcagtatttttcgcgttttgtgtattcatattcatcgtcctccctgtgatctgttaatttaattataccacatatcaaataaaaatcaatactaaattataataattataatttaggttcaagtgaacagctttttctttataatcgattcccaggcggaccacggaaagagtgagcggaaagccaatgtcagcttaacgcccctgccgatcggataccgcagtttcttcagccgtttcctttgtgccaattgataaatcagctccgttacgtcatcaggatcgccgcttttggatgcgttggctttgaagtaagcttcgatttgctgataatagcggtaatagggcgaatctttgccgggtgccgtaagatgattggagagagacgtttcccatatagacgttttataggagcccggttctattaaagcggcatcaattcctaaaggcagcagttcgaggcgcaggctctctgtaaaaccttcaaccgcgaatttggaagagacatacggagatagagccgggaaaccggtcagtccgctgatactgctgatattgaagatttttgccccgccatgttttcgcatataaggcagcacggtttttgtgacgtgaatcaggccgaatacattcgtttcatactgctgtctgtaatgtttcatcagcacatcttcaataaaccccccgtacgcagtgccagcgttattgacgagcaggtcaatcggtccgaaaccgctgatggtgttcccgaagtcagacaccgactgctcatttgtcacatctaaagaaacgaccgtaatatgttcggatgcacccgcttgagcggcggcctctttcagtatttcagctttctccggctgtctggctgttgcgatgacgtgataagaccggacgagcttcagcgctgtcagcagcccgaatccgctcgtcgcgccggttacaatggcaatttttctgttcatcttataatcctccccgtttgttcttatctcatagtgtatatcatctcgcggaaagaaggagaaatcgttcggaaatatgtcagaattgttttataatggagtcagcttcggatagaaaggggtaaagaaaagatggcattagagggattgaaggaaacatgggatttaaactccatttttgagggcgggagccggtcggaagagtttcagcaatacatacaagagctcaaaaagcatctaagcgcttttcaacatgcggctgaagcgtttacagttccgacgcatgcggatgaaagccgggagctgatcaatctgattgataggtttgaacggtcagcgatcatgatcaggcaggcgggagcgttcgtcggctgtcttcaggctcagaacactcatgatcagaaagcgaatgaatggagggcgcggatcaatcagctgagcagtgattttaaatccgctctggtcacccttgacgatacacttgcccggattgacgagcgggtctgggaggagctgctgcaaaaaccggaacttcaggatctcacatatgttttaaatgaaagaagagaccgggtcaaagagaagctcagcgcttcagaagaaaggctgattgaaggcctggccgttgacggctatcacgcatggggcgatctgtataatgcggctgtcggcagaatgaagattccatttgaggataaagagctgtcggtcggccaagcggaaaatatgatggcgcacccggatcgccgcatcagacatcaagtgttcaaagagcttaatgaagcgtggaaaggagaagaggagcttttcggcagcacgctgaaccatctggccggcttccgcacggaaatctataaagcgcggggctggaaaagcgctttggaagagccgcttgcgatcaatcggatgaaaaaagaaacgctggatgtcatgtggcaggtcattaccgatcataaaaagccttttgccgaatacctgaatcgaaaggcatctcttttagggcttgagcggctgaactggtatgatgtgggcgcgccgatcggcgaggctccgaaagaatacacatttgatgaagcggccaatctgatcgtcagccaattttcgacgtttggcaaaaagctgtccgcatttacggaaaaagcgttccgtgatcggtggatagaagcggaagaccgcagcggtaaacgggtcggcggtttctgcaccagttttcccgacagcggagaatcccggattttcatgacgttttccggaagcgcttcgaatgtatcgacgctggcgcatgagctcggtcacgcgttccatcaggaggccatgcttcaagtgcggcagctgaacagagcctatgctatgaatgtcgctgaaacagcctcgacctttgcggaaatgatcgtcgccgacgccgctttgaaacaagcggcgacaaaggatgaaaagctgttcttgcttgaagataaaattcaaagaagcgtagccatgtttatgaatattcatgcgagatttttatttgaaacgcgtttttatgaagagcggaagcagggcgtcgttccggctgagaaactgaatgaactgatggaagcggcgcagaaagaagcgttttgcgattcattaggggaataccaccctcatttctgggcgtcaaaactgcattttcatattacgggagtgccgttttacaactttccgtatacgtttggttatttattttcgcttggaatatatgcaagagctcttcgggaaaaagcggattttgaagaaaaatatatcgcgcttttgtgtgacacggcttcgatgactgttgaggatttggcgatgaagcaccttggcgcggatctgacggaacggtcgttttgggaagacgcggtccgccttgccgtacaggatgtgcaggaatttttagagctgactgaatgataatctggagatgaaccggccggagtgttaccgctccggttcttttttgtttaatgaatgacagccgcctcccttggaaatacctaaaaacgatcggaatggaatgggagtgaatcgcatgaaatggttcaggacggcgggcgttttatgtcttatgctgatgctgattgccggctgccgattgaatgaagaaaaacgggaagcggaacaagacagcacacccgtgtcatccgcgaagccggttccttacagcagcttttcccttcgcgttaactacggagccggggagcataaccgctatgaaggtttgtatgagagaaaaggcggtcatgaaaaggcggacatccgggacaagctctcaggggttcacagagagggcgaggaagcgcttgatgaaatgaagatgatcctcggagaacttgccgtaaacagccggatgcaggaaagcgagatcgtccggcaggtgctctcggcttttaatttggacagccgctatgaccatttttatctgaaactgaaaaagaatgatggagaaatgacggaaataaaaaaataaccgccgtccgctgcttttttgcccaaaactaattgataatgatattcagagtcattaatttctgttacaatataatcatgatctcacgttgaatgtttaggcaatttgtttatatacatagtgttgggaaactcaaaaaaggagcggttagcggtatgagtgcaatttctacagagacgctgagcttagggtacggagagactgttatcattgacgaattggatgtcgcgattccaaaaggcgaaatcactgtattgatcggaagcaacggctgcggaaaatcgacgcttttacgttcattggcccggctgatgaaaccgaggggcggttctgtgcttttagaaggaaaagccatcgctaagcttccgacgaaggaagtggcaagagagctcgctattttgccgcagagtccgtcagctcccgaaggcctgacggtgcatcagcttgtgaagcagggaagatacccttatcaaagctggctgaagcaatggtccaaagaggacgaagacgcagtggcaaaagcgcttaaagcgacgaagcttgaggaaatggccgaccgtccggtggattccttgtcaggcggacagcgccagcgcgcatggattgcgatgacactcgctcaggatacggatatcattctgcttgacgagccgacaacctatctcgacatgacgcatcaaattgaaattcttgatttgctgtttgaattaaatgaaaaagaaaaacgcacaatcgtcatggtgctgcacgacctcaatctggcatgccgttatgcccattatctggtcgccattaaggataaacagatttacgcagagggccgtcccgaagaagttatcacttgcgagcttgtacagcaggtctttgcgatgaactgccaggtaacgcaagacccgctgttcggcacaccgctttgcattccgcacggacgcggcagatgtatcgtgcaggaagcggccctcaccgcccgattgtcataatcatgaaaaagggaagggaacggtatggaagagaaactgcagcagcagctggacggcctgcttgagaaatacacggaactattgcttggcgaaacaaacccggatgtaaaggaagaagtcaggcagtggattttgtatacacatatcgcaaaaagcatgcctccgctcgtcaaacattggaatcaatcctacccggacgccaaagagggcatcaaagctgcgatacagcatattaaacagctcaatgaagcacacagaaaaaaacaataaaaaagctttcggcatcaaagagaggtgccggaagctttttttttgctgaaaaggaatcaataaaggcttcgttcaattcataggcgaagaactttaatgtaactaatgcacccgtttgtttacgtatatttcttccgcttgctgaaccaagaaaaaaggaccgccgcagcaatccctttctctctttcctatatatcacatttcctttcggctacgtaataactcttcaaatgcttttatatttgtatcaaaattgggcactgtttgagattcctcggcacatttgacttgtgccacaaccaaatcatgaaaaggtgttgaaatgccagtaccttctgccattttgggaataactccattaatataatcaatttcagttttgcgttttttctcaagatcctggagcatacttgctcttagcagcctagatggttccatggctgacctaaatgtttggatacgttcaggaatatcattttcacttcttaattccaaagattctaaatcaaggccgcccattttcgcaaatttgacaccattggcgtgtccaaccttaatcgtctcatctgcgatatggactgcgctaacaatgccgatttcatggtcaagaatgtctccgtattctccgtttaatgctgccgataaaccactgaatgcattattgataagtaattttgaccacttcgttccaactaaattatcggaaatatgtgttccgccgataaggtctaaaaccgatttaatacgcaggattctttctgttgtttcaccatgtaattctccaatttgaaaagcgtactctttaaattgagtatactcagttgtaagtctggatacgcccggctcaataaacgtagcaccaaattcaacagaacctgcaataacacgttcatcaccaacgatcgaagcaactttctgttcaggtataccgttttgcaaggaacatactacactgtcatcctttaaaaaaggcagcaactctttaagaatggagtcattatataattgtttcgtcagaagtaatattaaatcatacttgcctgacttgtcttcaggggtaatggctttcacttttgcttgaaattccgttgtaccaactactttagcacctatttgatttagagtatctacatgttctttgtacgaatcaatcaattcgacatccattccgccagcagacagatatgctccaactatggttcctaaagaacctgctcctaaaactgcaattctcattgtaaacgtctccttatttttcctctaagtagttataaaccggctgtgctgcatttaaggttaaatctgtaaggatatgagatgctgaaacgacttctaatacaggcaaatctgcaagaggtgccagagcatgttcaaataattgaagccgcgccggtccagtccaggcacctttaacttctatattcgttatttgcgttcgcaccaaatcacaaacccttaaatcaccattgtaatcagtagcaatcttaaccataaaattaggtcggcaaatttcccttttcgctttttccttgtccatttcgaaatgtttatatcccatagtcgcagttgccacacgaagactgccataatccaatgtgccgacaagagtatcagagtctatatacagcttaggggcacccaatttctttggatatgcagtaagttcccgtccgcttgcaatagccgggaaattgtcaacatacatagaatgtacataatctccttcttcaccattaaagctgacagggatgacttgtccagcctctgtataggcgccaagtccggaaacatcgggcatccacatcacttcgaatttcactaaaggttcagtaatttcaagaggttctggcactgccgcacgtaaagctttttcatccgttcggtaaataatattaaggtattcccggttaacaaatttataggttggcacggggtaagcaggtgatgttaaaggtgtgtttaaatttttcacaatgttattcacatcaattttcatagtatgagacccctttctttttcttttttatgttttttaatttaactatgctattatcttacattcgcatttacatttaatccaatacataataaggtatatatatatttattgaaataaatgagggggtgcagacagatggaattgctgcagctaaaatactttcagacagttgcctatactgaacatatttctaaagcggcagaacaattaaagattgcccagccttctttaagtctcactataaaaagacttgagaatgaactgggaacaaccttgtttgagagaaaaggcagaaatattaagctgagttcagcagggaaaattcttttaaaacatgtaaacaggatttttactgagattgaaaatgcccaaacagaaattcaattggaggaacatcaaatttctgacaagataagaatatctatttccaatccaagattccttgcaggactgatgagtgaatatatcaaccgctcccctcaatcaaaaattctccaagcaatcggagttaaaagcgagatcataacaagtttaaaaaaaggggacattgatttaggaataacaggtcatccgattcaggatgaagagatagagagttgtgtgctggtaaatgaagatattgttctggctttgccctcaaaccaccgatttacgggtaaaacagaaatttctttacgccttgtcgccaatgaaccatttattacccttgctaataatgaagagtatagcggttttacagcctcgctttgtgggaaagccggtttcaccccgaatattgcgtttgaggcagattctcatttactggtcgagattttaaagctggatcaaggtgtggcgttgcttcccatttcagtttgcagaacattggggctgaattttataaaagtgactgatcactctgcttcatatccagtcggcttatcttggatgagacataagctgttgtcttcttcggtaagaaattttcgtgactttattatgtcgtactataaagataactatgaaatgtttaaagtttattaaagggtttcatcattacttttttgaattttttcccccatttcccgtttcacttgttgcgggatgggtacttgcgattgttgttttcttaattttaaagttttcgaacggaagcccttggtgttatacaacgttgctttttgcaatgccggcttcctttgacacgctgttaaaaattaatgttttttagttggttttaaaagcctactattatccgttttgctatacggatctcgtgaattttttcaattgttcttttcgatcataattagatatttactgagcgtaaaacattggaacgaatcctgtccgggcaccaaagagggcatcaaagttgcgatgcgatacagcacattaaacagctcaatgaagctcacagaaaaaaacaataaaaagcttccggcatcaaagagaggtgccggaagctttttttgctgaaaaggaattaataaaggcctgtaatgcactgctcatatatgaatccttccgcgtgacgaattctgttttcatcaggctgaaagattcgggaatggtccataaccgaacagcacccagtgcggcgtgctgcgtaattacgcttcgcgggagcagcgtaatgccgagccccgccgtcactcccccgataatcgcttcaagggtgccgaattccataatggccggatgcgccgttccaatggaatgaagccaccgctctaatgtgtcacgatacgtgcatcccgtactgtacacaagaagcggcttttttaccgcttcttctatagcggtgacggcagcgggagtcacgacaacggcttcttcttcaaaggccgggatggagtgcaaatccggatgatgaaagtgacagccgataaatgcgccgtccaattcatagcgaagaactttatcagttacatattgtgtatgccctgtcgtaagggacagctccacatcaggataccgctcataataagaggctaaaagtttcggcagcctgacggcggctgttgtctgggtggagccgatcatgagcggtccgctcggcttgtctgttgaagcgagcgccattttggcttcttctatcagaccgacgacctgatccgcataatggaggagcactgtgccgcttgaagacagcgtcatcccgcggttatggcggaaaaacagctcggttttcaaatcttcttccagctggcggattctggccgtcacgtttgactgcacatagccgagacgcgcagccgcctttgtaatggaaccttcacgggccaccatctgaaaaatccgcaaatctccgctttccattgtcatctctccctctttgctatcattttttgtgatataaaacatctttaacaatcattatacgaaaatgcagatctccattacaataaacatatcagctgatgaacatcgaacgtaaaaggagaagaagccatgaatttacaacataaaacggcactggtcacaggcggcggtacaggaatcggaagagcggcgtgccttgccttagcaaaacggggagcggcagtcgtcattaactattcacattcaaaaacggaagcggaacaaacggcggaattcataataaaagcaggcggacacgcgatgaccattcaagcggacgtttctatagacaaacaggcgagagacatggtgaacgaagcggccagccgattcggaagcctcgatttactcgtaaataatgcgagcattaccagacatatcccgcttcatgatttggaatctgcaacgaaagaaatatgggatgaattatttgctgtcaatgtaaacgggatgtttcattgcgccagagcggcagcgcctcatatgaaaaagcaaaagtcaggtgctattgtgaatgtcgggagcatcgccggtctgacgggagcgggttcttcccttccgtatgccgtttccaaagcggcggtgcatggcctgacaaaatcattggcccatgcgctggcgccggacatccgtgtatgctgtgtcgcgcccggagccgttgcaacaagatggtggacggggcgggaagagacgatgtaccggcttgccggaagccttccgctggaacggatcgccgctccggaagatatcggagaactgatttgctctgtgctggagcaggaatcactgacgggacaaatcataacagccgattgcggccagacgatgtgacgaaaggagagagaaatgatgccgtttgtacagatccatttacagaaaggaaaaagcggactttggctcaaaaaaatgagcaccgttattcacaccgccatgacggagatgattgatgttccgcatgatgactattttcaagtggtgcatcagcacgaaaaaggggagtttttctatgatccgtcatatcttcaagtcgagcggagcgatgaactgatgtttatccgctttactttgaaaaactccagaacaactcatcagaaacaagcattctatcagcatttggctgaccggctgcacgaaaagctgggcgtcagaaaagaagatgtgtttatcgtcctctcaggcaatgcggcggaagactggtcattcggaaacggggaggcccagatgatataaaaaaatcccgcggcatccgcgggatttttctttgttaaacggctttcgccttttcttcttgtttgcctgtctttttgtttgtcagtttaattgatttaacaaacagcgtgaggatcaatccggcagcgataaaggccaggcctgtgaaaaacacgctgtgaagcgaatccatcagtgacgttttcaaaaccggcacgatatgggaagaaaatgcggccggaatctgcttaatcgattcctggctgaacaaggattgaagcagcccttcaggattcttgtcaatcatacctttaaactgggcggcaaaggcacttgcctgtttcggcagtgagtctaagtaaggcaccagtctgtcggttaaaaggcttcctgatctggcattcatgacagcgccgagcaccgtaatgccgaacgttcccccgatcatccggaaaaattggcttgaagaggtcacaacacccagctcttcttttgaaaacgtttcttgcagagcgagtgtgagaagcggcatgacgagccccattcccagaccgatcacggccatatagcatgtagccgcgagcttgcttgtatccagctgcaaagtcgttaataagaagaagccgacggccatgatcagcatgccgatcatgatttgcggtttaataccgatcttataaaccagctggcctccgataatacttgtgataatcatagataccatcatcggcgtcataatcgtgccggacgcggtggcgctgactccgataattccctgcataaagaaaggaacaaacgtgacggcgccgaacatgccgatactcatgaaaaagccgatcagattcagtacggtaaacgttctgtttttaaacaggtacatcggcagaatcggttcttttgctttgatttcagcgaaaatgaatccgacaatcccggcaagtgcaagcgcaaagagaccgagaatctgccaagagccccatgcgtaatcctttcctccgaagctgagcgcgaggaggaggctgacgattccgacgatcattgtgaaaatgccggcgatgtcaaagttaatcggcccggtctgttttctgccttgaagtcctcttgcgataaagatgacggctaaaattccgacaggcaggttgatatagaaaacccatttccaatttaatgagtcaacaatccatcccccgatttgcgggccgatcacggaagcaagcccgtaaatcgccccgaaaagcccttggaacttggcacgctgtttccctgtgaacaaatccccgatgacgatcatagccatcggcatcatgacaccgccgccgattccctgaagtccgcggaaaataatcagttccgtcatgttgctggccattccgcacagtgcggaagctcccataaaaatcaataaacctgatacatagacgacgcggcgccccaataaatctgcaagtttccccgcaatcggaacgatcgtcgtcgaagttaaaagatatgctgtggtcagccacgtcatcatgcttaatcccccgaggtcacccacgattttaggaatcgccgttcctacgatggtgccgtcaagggctgagaaaaacatggcgatgattaagccggttattaataatgtgcgttttggatctttcttttcaatgctcatgtttcggcagctcctcttttctattcgttttctttttgatcagccgcgtatttctcggctgcttcagctactttgcggatgatgttcacggactgaatcagttcatcgtcagtcagaacggacaggtttcgcgccagtatcgctttccgtccttccacaacttcttcgaattttgtttcgccttttttggtgaggctgatgtcgatgacgcgtctgtcctgctggttatgtttgcggacgataagtcctttttgttcgaggcggtcggccatcagcgtcactgcgctcggttttacctccatgcgttccgcaatttcggaaactttgcagctcccgtattttttcaggctggctaaaacaaataattgggcaggcgtcacctcgtgttttgccatgctttccaccatttcaggctgtatgttttgcagcagcgtctgaagagatttctggatgtcagacacatattgatccgcgtttttcataactcctcctcatcttgttccttgagaaaataattaacattagttaaatataaataaggattaatgataagtcaatctttttgtgcaaaaataaaaaaaggattgatgcttgtcgaaaacatcaaatccttattcgttttattgctggtagggagactgctgctgaatagtctgctggaacttctgatacgattgctgaagcttttgggtatcggctgcttcaatggaataccagccattttgaaacatcacatcgtataatcttctttgcgctttttgtgactcatcgaaaatcgcctgaatatcttgataaagagactcgtggctgaactcgtgcagggctgtgcaatatgaagccgtgatgtatttttccgtcgtcagcagctcattcaccaagtctctgtcattcatttgcgccgtattgggcacgggcgtctgcggattcgtgattttttgattttgctgttccatgtattgtcctcctattgcatatagcctgttgttgtctgtccgccttgatcggggttcaagcggcccaatatgtgctgataatgtttctgatgcatccggccgatttgatcaagctcttgttttaacgtctgattctggcagtgttccgccataaaatgcgcttttttcatggcaagcagattccagttcagcatgtcctcaagatacaaatggtctttcgttgagatgacggcaggcggcaagtttccgtgctgctcttggttgttcatataaacgcctccttcaattctgttctttttagctttctctgcgaccggaaattcatacacgaataaaagaaaaaggagggagttcatctttgctgcggaacatatgtttatttttgtcgaaaaataaaatgcttacaaaattcgcccaggcttacggaatccgcttcggcgcgggaaggttcgttgcaggggaaacactcgcggaagctgtgaaaacggtaaagcggctgaaccaaaaagggctgtcggcttcgattgattatctaggtgaatatgcgggttcagagaaggatgcgaaaaggacggcggtagaatgtaaaaaagcaatcagggcgattgccgagaatcaactggattgtgagctgtctctgaaattaacatccatcggtctggatatttccgagaaactcgcggaacagcatgtcagagacatattgacggaggcaaaagaacgcggcgtgcctgtaacgattgatatggaggactattcaagatgcggccgtacgcttgagctgtataagcggtgcaagccggattttccgatgctcggcaccgtcattcaggcttatttgtaccgggcagctgaagacatcagcggtctgatgccatacaagccgcggctcaggcttgtaaaaggcgcttataaagaatcggcggccgttgcattccctgataaaaaagcaaccgatcttcattttcagcagctgattaagctgcagcttttgagcggccatgaaacggcggtggcgacacatgatgatgacatcatttcttatacgaaaacactcatcagcgagcatcagattccccgagagcagtttgaattccaaatgctgtacggcatcagaacggagcgccagaaggagcttgccgaagaaggatacaggatgagggtgtatgtcccgtacggaaccgattggtacgggtacctgatgagaagaattgccgagcgcccggcaaacgcggcatttgtgctgaaagggatcttcaaaaaataacggctgctccaaaaagcagccgcagcatgttattccatgttttcttttttatattgctgattttggctcgtccgtttgccgccgccgtatttttgcttcggtcccgcatttcctttcatgctggccgcgctcactgcggcagaagacggatcttttctccctcgcaccattcccttcacctccgggtttaagtttcccgcccgcgccatggaacatgcggaagccgaaaaatttaaaaaaattccatatttgctattgaagtcatcctgaaaatcttttaagatgaaagaagaaaagggtttcattttttttgccgaaaaaatgaatgactattcattcaaagttcaagggggatgactcatgcacaagtttataaagaaagcagccgttctcggatcaggcgttatggggtccggaattgccgcgcacttggctaacatcggaattcccgtcctgctgcttgatattgtgccaaacgagctgacaaaggatgagatgaaaaaagggctgacattagaaagcccggaggtccgcagcagactgagccgatcggccatgcaaaagctgctgaagcaaaaaccggcgccgctgacttcggctgccaatctcgactatataacggcggggaatttggaagatgacgcagctcaattgaaggatgctgattggattattgaagtcgtcgtcgaaaatcttgacgtaaaaaaacagattttctcactcgttgatgaataccggaaaccgggaagcatcgtgtcgagcaatacgtccggtatctccgtcacaaaaatggcggaaggccgatctgccgattttaaagctcatttcttaggaacccatttctttaatccggcccgctacttaaagcttctggaaatcattccgattcaggaaacagatcctgacgtactggagtttatgacttcatttgcagaaaacacgcttgggaaaggtgtcgtcatcgcaaaagacacgcctaactttatcgccaaccgcatcggtacgtacggcctgctggtcacggtaagagaaatgctttcttccggctgccgcatcggcgaggtggacacggtgaccgggcctttgatcggcagaccgaaaagcgcgaccttcagaacccttgacgttgtggggcttgatacgttcgcccatgtggcaaaaaatgtgtatgataaagccgacggcgctgaaaaagacatgtttaagcttcctgaatttatgaatgacatgctgaaaaacaattggctgggcagcaaatcaggccaaggtttttacaaaaaagaaggtaaaacaatatatgaactcgatccgctgaccatgacatacggtgagcgttcgaaaatgaagacgcccgctttagaagccgccaaacaggcaaagggtgccaaaggcaaaatgaaagcgcttgtatattccgatgaccgcgccggacgcctgctttggaatatcacatcgcaaacactcttatactcagcccggcttttaggtgagatcgctgatgatatcaaagcaattgatgacgccatgaaatggggcttcggatgggagctcgggccgtttgagatgtgggatgccatcggcgtcagaaaatcagcggagcggctcgaagaagaaggcgcagcactccccggctgggtgaaagaaatgcttgatcagggccatgaaacattttatatgaaggaaaacggaacaccattttactattcagacggccaatacagggccgtgaaagaaaatccgaaacggatcagcctgcaaacgttaaaagaaacaaaaggcgtgatcagtaaaaacagcggcgcaagtctgattgatctcggcgatgatgtcgcgctgctggaatttcatacgaaaagcaacgcgatcggcttagacattattcagatgattgacaatgcgcttgaggaaacggagcggaattataaaggacttgtcatcggaaaccaaggcagacatttctgcgcgggagcaaaccttgcgatgattttgatggaagctcaggatgataacttcatggaagtcgattttgtcatccgccgttttcagcagacgatgctgaacatcaaatacagcgctaaacccgttgtcgcggcgccattcgggatgacactcggcggcggcacggaagtctgtctcccggcggcacgcgttcaggcggcgagcgaatcgtatatgggtctcgttgaaaccggcgtcggccttattccgggcggcggaggaaacaaagagctgtacatgaattatttggacggcggaagtgaactgatggacgcagcgatcaaaacctttgaaacaatcgcgcttgccaaagtgtccggttcggcacacgaagcccgtgatatgaagattttgtccgcggcagaccgtatcagcatgaatcaggatcacctgctgcacgatgcgaaacagctggctgcttccttatatgacagcggataccgcccgcctgcccgcaaaaaagtgaaagtcaccggagaaaccggctgtgcggcattactgctcggagcagaccaaatgagacggtcgggttatttatccgatcacgatatgaagattgcaaagaagctggcccatgtcattgccggcggaagagtcccgttcggcacggaggtttctgaagaatatttacttgagattgaaagagaagcctttttaagcctcgctggcgaggcgaaatctcaagcgagaatgcagcatatgctcgtcaaaggcaaacctttacggaactaggagggtgtttatgagagaagcagtcattgtggccggtgcgagaaccccggtcggtaaagcgaaaaaaggatcgcttgcagccgttcgtcctgatgatttaggcgcgctttgtgtaaaagaaacgctgaaacgggcaggcggctatgaaggaaatatcgatgacttaattatcggctgtgcaacacctgaagccgaacaaggattaaatatggcgcggaatatcggtgcgctggcggggcttcctcatacggtgccggccattacggtgaaccgctactgctcttccggtctccaatccatcgcttacggtgctgaaaaaatcatgatcggctcgggagacaccgtcattgcgggcggtgcggaatccatgtcgcaagttccgatgatggggcatgtgacccgcccgaatatcgctttggcggagcatgcgcctgagtattacatgagcatggggcacacagcggagcaggtcgccgaaacgtacggcgtatccagagaagaccaggatgcatttgccgtccgcagccatcagaatgccgctaaagcccttaaagaaggtaaattcaatgacgaaatcgtgccggttgaagtatcgctgacagaagtcggtgatgaccataagccgcggaaaaaacaatttaccttttctcaagatgaaggcgttcgtcccggcacatcggctgacgtcttggcgaagctccgtccggctttttctaaaacgggaaccgtgacggccgggaactcttcacaaacaagtgacggcgcggcggctgtcatgctgatggatcgcgaaaaagcatcgtcgctcggattggcgccgcttgtcaaattccgttcgtttgccgtaggcggcgttccgcctgaggtaatggggataggtccgattgaagctattccgcgggcgctcaagcttgccggactcgaattacaggatatcgggctttttgaattgaatgaggcctttgcttcacaggccattcaagtcatcagatcgcttgggatagatgaagaaaaggtgaacgtcaacggaggcgccatcgcgctcggacatccgctcggatgcacgggaacgaagctgaccctgtcactcattcatgaaatgaaacggagaaacgagcaattcggcgtggtgacgatgtgcatcggaggcggcatgggcgctgccggcgtatttgagctcatttaaaacaagggggaaacgaagcatgaaacaggatacggtcaacgtcaaaaaaggcggcagctttctgattgaagagacgggatatgatcaaatattcactccggaggactttacagacgaacataaaatgatcggcaaaacgacagaagactatgtcgtaaacgatgtgcttccttatatcgatgaaattgaaaaccatcagttcgagcattcggtcagactgttgaaaaaagccggagatctcggcctcctcggagcagacgtgcctgaagagtacggcggaatcggcctggataaaatcagttcagccttcattacggaaaagttttcacgtgccggcagcttttcgctgtcttacggcgctcacgtcggtatcggctcattgccgatcgtgttcttcggaacggaagaacagaagaaaacctatttgccggacttggcttcaggacaaagaatcgcggcatacgccttaactgagcccggttcaggttcagatgccctcggcgcgaaaacgacagctgttttgaatgaagcaggcacacactatattcttaacggagaaaagcaatggattacaaactccgcctttgcagatgtctttgtcgtctacgctaaagtggacggagataaattttccgcatttatcgtagaaaagaactatccgggcgtgtcaacgggcccggaagagaaaaaaatggggattaagggttcatcgacaagaacgctgattttagatcaggcggaagtcccgaaagaaaaccttctcggcgaaatcggaaaaggccatgtcatcgcttttaatattctgaatatcgggcgctacaagcttgccgtcggcacaatcggcgcttcaaaacgggtgattgagctgtctgccgcttatgcgaaccagcgccggcaatttaaaacgccgatctcaagcttcacgctcactcaggaaaagcttgcgacgatgtcagcgcggctttacgcgatggagagctctgtatacagaacagtgggtttattcgaagataatatgagcagattgacggaagaggagcaaaaggacggacgcgaagtcgcgaagtcaatcgccgagtacgcgattgaatgctcgctcaacaaaatgtgcggttctgaaacgcttgattacattgccgatgaaggcgttcaaattcacggcggttacggatttatgcaggaatatgaagtggagcgtgcctatcgcgactcaagaatcaacagaatttttgaaggcacaaatgaaatcaaccgcctgatcgtaacgagcacgttcctgaaaaaagccgtaaaaggtcagctgccgctctttgaaaaagcaaaagcgctccaagaagaactcatgatgctgatgcctgaagagccgggctcagaacctctcgaacaggaaaaatacattgtcagacaggcgaaaaagatcgccctcttgacagcgggtctcgcggcgcagaaatacggcaaagagatcgaaggcgagcaggaaatcatggtgaacattgccgatattgtcagcgcgctgtacgctttggaatcttccgtcctcagaacggaaaaagcaattgcggcggacggtgccgaaaaagccgcgcagaagctgttatatacggaaatctttgcccaggaagcccttcagaacattgaagcgcacgccaaagaatcactgatcgccatggaggaaggggattccctccgcatgatgctttccgtgctgcgcaaactgacgcgcctgacgccgaaaaacctcattcagaaaaaacgtgaagcggcagccgccgtcttccgtgaagaaaaatatacggtctgatcacatgctgaaagcgctccttcatcaggggcgctttttcacgaagcaacgttataggtttttacaagtgattgtgttaaaataacgacgatcatttacaaggggtgaagaagatgtcgttaaatttttactggtaccctaaatgcggaacgtgccgtaatgcgaaaaaatggctggaagaccgcggtaaggaaataaacgaaatacatatcgcggaggaaactccgtcgaaagaagaaattaaagacctctatgagaagagcggtcttgagctcaaaaagtttttcaacacgagcggaatgaaataccgcgagctgaacttaaaggaaaaactgtaccacatgtcagaggatgaacagcttgaactcctggcatcagacggtatgctcctgaaacgcccgattacgacagacggcgaaaaagtcactgtcggctttaaagaagaccaattcgaaaaatattggatgtaatgccaggttcaaagaattatggtatcttcttattataagaaaaaaatggagggatttagatgagcacaccgaaagatatgcgttattccaaagagcacgaatgggtcaaagttgaggacggaaaagcccgcatcgggattacacatttcgcgcaagccgaacttggcgacatcgtctttgtcgagcttccggaagtcggcgccgaaattaaagcggacgagccattcggcagcgtggaatccgtcaaaaccgtatccgaactgtacgcaccgattaacggaacggtgacggaagtgaacgaagaccttgatgacagtcctgaattcgtaaacgagtctccgtatgaaaaagcgtggatgatcgtcgtggaaccggctgatgctgaagaaatcgaaaacctcatgacttccgagcaatatgacgaaatgacacaggaagactgatcggatagcaaacgggccatttggacattctatctgtaacgggaggtgtctaaaatggcttttgataaacaaaaggtcgatgtgacggagaacgttacgggccgctttcaaaacggccggttttccttgtttcatgaaaatgaagccatcggcgagatgacaggcatggaccagtacgagctcaaacagggcttttcatttgaaaatcaaaaattttataaaacagccgatgtcataaacggcagcgatccgaaatatgtcgattgcgattatgagagtggctggtgttaacagttggcggtgaatttcactgccttctttttcaatctgacgctaaaacaatcggcaggtgacgcgcttatgtacaacggagatgaaaaggtcattatcgtagaaggaaaatctgataaaatcaaagtcagggaagtgctcatcgaacccgcagaaatcgtctgtacaaacgggacgatcggccaaaccgaactggaagatttggcggaccgcctgtttgacagagacgtctatattttaacggacgcagatgactccggagaaaaattaagaaaacagctgaaacgggagcttcccgaagcgcgccatatttatatagacagaacatacaggcaagtcgagtcgtgcccaggccatcatctcgcatctgtgctgatcagagccggctttgatgctgacactgtatttttgaaaaagaacgacctgaggtggtaaacatgaaagaactccaagaaaatgaactcgaatcgattcaggatgacgtttatctcctgtatttgtacaccccgttttgcggcacatgccagctggcgtccaaaatgcttactgtcgtcgaagaaatgctgcccggcgccgccttctataaaaacaacgtgaattattcccccgcattcgccaaagcctatcagattgaaagcgttccgtgctttttgctgtttaaaggcggagagcttgttgagaaaggatacgccttccgctccgtttcctatttatatgagctgattaaacaaaaaacatcgcaaacgttcccgatgtgacaatatttacaggaaaatgtcgtgcggtttataaagggttctgtccgttaaaaagagaaagtgtatgtatggccattaaaacgggaggttatacgagtggagaaaatagaagtttcagagaatgacggacagcatctgtttttgaaaccgctattaaacgcctcaacgctgctgattacattccaaggagaaacagaagccttaacggtctcaattaacggacagggagaaatgagaaaaacgtcggtttcaaaggaaaaatctaatttgaccttttacggaaaccagacggaaatcatccatctcctgcatggtgatgtctctttgcaaaagcttatccaaagcggaaaactcaaagtgaaaggatcattcagagctctgctgaagctggaggccatcctctggctgacaaacggattttttcaggcgatcagtaaacggccttaaactgccaatctactatgtgacaatagcttccaatatttattttattgactttttatcattcgccgtgctattctacagtaagaatttccggacgaaaatacgatatgttttctcttatcaagagaggtggagggaagtgccctatgaagcccggcaaccatcaacaatgttgaaatggtgccaattcactcgaagcggtctgctttggaagatgagagaaaggcctttttcaataagcctttctgctcatttttgcagaaaggcttttcttttgcggagaaacccggaagatttcttagaatagtgtaaggcgggtgattgctttgatccatcttcaaaatgtttcaaaaatttacaaagcgaagcatggggatgtcaatgctgtccaagatgtcactcttgatatcaaaaagggcgaaatatttggaattataggatatagcggagctggtaaaagttccttaatccgtctcctgaacggccttgaaaagccgacgtcgggaaccgtggaagtcgcggggacggaattaaataaagtaagcagccgcggactgagaaaagcgcgccaggaaatcagcatgatcttccagcattttaaccttctgtggtcgcgcaccgtccgggagaacattatgttcccgctggaaatcgccggcgtgaaaaaaagcgaacgggtccgccgcgctgatgaattgattaaactggtcggattagaggggaaagaaaagtcttatccgtcgcagctgagcggcggtcaaaagcagcgtgtcggcatcgcccgggcgctcgccaataatccgaaagtccttctgtgcgatgaagcgacatcagcgcttgatccgcagacgaccgattcaattttggatcttttatccgatataaatgacagactcggtctgacgatcgtgctcattacccatgaaatgcacgtcatccgaaaaatctgcaacagagtcgccgtcatggaaaacgggaaagtcgttgaagaaggcgaagtactccaagttttcagaaacccgcgcgaaccgatgaccaagcgtttcgttcagcaggtgacagaaccggaggagacgaaagaaaccatccagcattttctgcaggaaacagcgacaggaaaaacgattcagctttcatttgtcgggcaggcagctgagcagcccctcattacggaaatgatccgaaactttgatgtggacgtcaatattctgcaggggaaaatttcacagacgaaggacggagcctacggttctttattcattcatattgacggtcaggaaaaagaagtagaaaacgtgatccggttcatcaaagacaaacaggtagaagcagaggtgatcacaaatgtttgaaaaatggttcccgaacgttgatataaccgagctgtggacggccacatacgagaccctttatatgacggtcattgctttagttttttcatttatcatcggagcgattctcggtcttctgctctttttaacgggcaagggaagcttatgggaaaataaaatcattaacaccgtgattgcggcggtcgttaatattttcaggtctattccgtttcttattttaattattctgcttctcggttttactaagtttttagtcagatcgattttagggccgaacgccgcattgccggcgctgattatcggctccgcgccgttttatgcccgacttgttgaaatcgcgctgcgggaagtcaataaaggagtcatcgaagctgccagatcaatgggagcaaagacaccgacaattatcttcaaagtgctgattcctgaatcaatgcctgcgttaatttcaggtatcaccgttacggccatcgccctgatcggatctaccgccattgccggcgccatcggttcaggcggactcggaaaccttgcatatgtagaaggctaccagtccaataatacggatgtaacgtttgtagcgacagtatttatactcatcatcgtctttatcattcagattatcggtgatgtgattacaaatataatagacaaaagataagggaggatttacattgaaaaagattgtattaagtgcgctgctgcttgtgttcgcgggagttttggccgcctgcggatcaaacggctcaaataaaaaggaaatcgtcgtcgccgcgacaaaaacaccgcatgctgaaatcttaaaagaagcggaaccgctcttgaaggaaaaaggctacacattaaaagtaaaagtgctgaacgattacaaaatgtacaacaaagcgttagctgataatgaagtggatgcgaacttcttccagcacgttccttaccttgaacaggaaatgaaagaaaataaagattacaaactcgtgaatgccggagccgttcaccttgagccattcggaatttacacgaaaaaatacaaatcactgaaagacctgcctaaaggcgcgaccatcatcatgactaacaatgtcgctgaacaaggccgtatgctggcgatgcttgaaaaagccggactgatcacacttgatccgaaggtaaaaacgattgaagccactacgaaaaacattacgaaaaacccgaaaaacctgacattcaaaaaaatcgcccctgaattaacggcgaaagcatataatgaagaagaaggcgatgcagtcttcattaacgtcaactatgcgattcaaaacaaactgaatccgttaaaagatgcgattcaagtggaatcaacgaaaaacaacccgtacgcaaacatcatcgccgtacgcaaaggtgacgaaaaatcagagaaaatcaaagcgcttatggaagtgcttcactctaagaaaatcaaagactttattgagaaaaaatacgacggagccgtgcttcccgtatctgaataaaacgaaaaccccggatgaatcatccggggtttttttcgggtattaatcggagaactgtccataataaaaaggaaggttaacgattggagggaatggcagtggctcaataccaggaaaacggaaaaagcgtgcatgacgcattgaaacaatataaagaaggtttaggtatattcgagcaaaaaatgccgatgatggggcggaagtttaatgaatttactgaacagtgtttctcagcggattcattaactgaaaaggagaaacaattaatcgctctgggcatcagcatcagcgctcaagatgaattttgcatgatttatcatacgaagggctgccttgaccaaggggcgacagaagaaaacatccttgaggtcatcggcgtcgcggcggcattcgggggcggcgcggctctcagtcagggagtgaccctcgtacagcagtgcattcaggaattcggacatacgacgcattagaaagagcaatcgtgtgaataccgtttttcagataaagcgagcgccggattccggcacattcgaaaggattcaggggcacactctctttggccggagcaacggatcattgttacaatagaaacaaatagatgaagggattgattcattatctgcaccagccacgagagactggaccttgactatacgcctgaaatggaaaaagcgatgcagaagtcacacggcatcggctacgaggaatacggacggcgtctttcaaaaaggatggaagtcgaacggcagagggagcttgaatatcaaaaaagcaagttcctcgcagcgcagcttaatgagaaaatcggtcagtaaaaaagggtggatttccgccctttttctgtttcaaacagctttaattacgccttgatctttgataaactttaggaatgttccgggtaatataaaaagttgtatttacttttcatttgttataaaattagaatgagaataaattgagaataatgattatatattttggaggtatagatatggctgcttcaacattaacgatcaaggatcttcacgttgaaatcgaaggaaaagagatcttaaaaggtgtaaaccttgaaataaaaggcggcgaattccacgctgtcatggggccgaacggtaccggtaaatccacgctctcagcagcgattatgggacacccgaaatacgaagttacaaaaggcagcatcacgcttgacggcaaggatgtactggaaatggaagtggacgagcgcgctcaggcgggtcttttccttgcgatgcagtacccaagcgaaatcagcggtgtgacaaatgccgatttccttcgctctgcgattaacgcacgccgtgaagaaggcgatgaaatttctcttatgaaattcatccgcaaaatggacgaaaacatggagttccttgaaatggaccctgaaatggcgcagcgttacctgaacgaaggtttctcaggcggggagaaaaaacgcaacgaaatccttcagcttatgatgatcgagccgaaaatcgccattcttgacgagatcgattcaggccttgatatcgatgcgcttaaagtcgtttctaaaggaatcaacagaatgcgcagcgaaaacttcggctgcttaatgatcactcactaccagcgccttctgaactacatcacgcctgatgtcgttcacgttatgatgcagggacgcgtagtgaaatccggcggcgcggagcttgcacagcgccttgaagcggaaggttatgactggattaaacaagaactgggcattgaagacgaaactgtaggccaagaagcgtaagcgttagggggataatcatgacattggaaacgaaactatccgtagatcaggaatatgtcaaaggcttttccgaaaagcatcaagaacctgcctggctgaaaaacctgcgcttacaggctcttgaaaaagctgaagatctgccgctgcctaagcctgataaaacaaaaatcacaaattggaactttacaaagttcaacaagcatacagtagaaaatgcgccgcttgcttctttagaagatttagctgatgaagcaaaagcgctgatcgatatcgaaaacgaagacaaaacgttatatgtgcagcgtgaccaaacgcccgctttcctttctctttctaaagaactgaaagacaaaggcgtcatctttacggacatcttaacggctgcccgtgagcacagcgacctcgttgagaagtatttcatgaaagacggcgttaaggtcgacgaacataaactgactgcgcttcatgcagcattaatgaacggcggggcattcctttatgttcctaaaaacgttcaggtggagacgcctgttcaggccgtttacgttcatgaaagcaatgacacggcattgttcaaccacgtgctgatcgtcgctgaagatcacagctccgtcacttacgttgagaactacatcagcacggtgaatccgaaagaagctgtattcaacattatcagtgaagtggtcacaggtgataatgccagcgtgacgtacggcgccgttgacaacctgtcagcaggcgtcacaacatacgtcaaccgccgcggagccgcgcgcggacgcgacagcagaatcgagtgggcgctcggactgatgaacgacggcgacacgatttctgaaaacacgacaaacctctacggagacggcacatacggcgatacgaaaaccgtagttgtcggaagaggagaacagacggaaaactttacgacgcagatcatccacttcggtaaggcttctgaaggctatatcctgaagcacggagtcatgaaagatgccgcatcttccatctttaacggaatcggcaaaatcgagcacggcgcgtctaaagcaaacgctgaacaggaatcccgcgttttgatgctgagtgaaaaagcacgcggagatgcaaacccgattcttttaattgatgaagacgatgtaactgcaggacatgcggcatctgtcggccgtgtggacccgatccagctttactacttaatgagccgcggaattccgaaagaagaagcggagcgcttagtcatttacggattccttgctccggtggtaaaagagcttccgattgaaggagttaagaaacagctcgtctccgtcatcgaaaggaaagtaaaataatgaatatcaccgatattcgtgaacagttcccgatccttcatcagcaagtgaacggacatgacctcgtgtaccttgacagcgcggcgacttcccagaagccgcgtgctgtcattgaagcagtggatcagtattacagcaaatacaattccaatgtccacagaggcgttcatactcttggcacgagagcgacagacggctatgaaggtgcgcgtgaaaaagtccgtaagtttatcaatgcgaagtcaatggctgaggtcattttcacaaaaggcacgacaacttcactgaatatggtggcgctgagctatgcccgcgccagcttaaaacccggtgatgaagtggtcatcacccaaatggagcatcatgcgaatatcattccgtggcagcaggcagtaaaagcaaccggcgcaactttaaaatatatcccgatgcaggaagacggcacgctttcgttagacgacgtccggcagactgtcacaagccatacgaagatcgtggcagtcgctcatgtgtcaaacgtgctcggcacgatcaacccgattaaagagatcgccaaaatcgctcatgacaatggcgcggtcatcgtggtggacggggcgcaaagcacaccgcacatgaaaatcgacgttcaggacttggattgcgacttcttcgcgctttcttcccataaaatgtgcggcccgacgggaatcggcgtgctgtacggcaagaaagaactgcttgagaatatggagccggccgaatttggcggcgagatgatcgactttgtagggctttatgaatcaacttggaaagagcttccgtggaaatttgaagcaggcacgccgattatcgcaggcgcgatcggattgggagccgcgattgattttcttgaagagatcggactcgacgagatttcccggcatgagcataagcttgcggcctatgcgcttgaccgtttcgagcagctagacggcgtgacggtatacggtccgaaagagcgggcgggacttgtgacatttaatcttgatgaggttcaccctcatgatgtcgcgactgtcctcgatgctgagggcattgcggtcagagccggccatcactgcgcccagccgctcatgaaatggctggatgtatctgctactgcgagagcgagtttttatctgtataatacagaggaagagatcgataagctcgcggaagccctccaaaagacaaaggagtactttacaaatgtcttttaatgcaaatttagatacattatacagacaagtgatcatggatcattacaaaaatccgcgcaacaaaggggttttggatgacagcatcgtcgtcgatatgaacaacccgacttgcggcgaccggatcagactgacaatgaagcttgacggcaataccgttcaggaagcgaagtttgaaggggaaggctgttctatctccatggcttcagcttccatgatgacgcaggcgattaaaggaaaagatattgataccgccctttccatgtctaagattttctcagacatgatgcaagggaaagagtatgacgactcaatagatctcggggatattgaagctcttcaaggcgtttcgaaattcccggcccggattaaatgtgccaccctttcatggaaagcacttgaaaaaggagtcgctggcgaaaaaggcggcaattaaaagattggagtgaaaatggatggctaaaaaaatgcctgaaattggtgaatacaagtacggttttcacgataaggacgtttccattttccgttcagagcgcggattgacaaaagaaatcgtagaagaaatttcacgcatgaaagaagagcctcaatggatgcttgatttccgcctgaaatctcttgagcatttctacaacatgccgatgccgcagtggggcggggatttaaactctttaaactttgacgaaattacgtattacgtaaagccgtctgagcgttcagagcgttcttgggatgaagtgcctgaggaaattaaacagacattcgacaaactgggtattcctgaagctgagcaaaaataccttgccggtgtttctgcacagtacgaatccgaagttgtttaccacaatatgaaagaagatcttgaagagcaaggcatcgtcttcaaagacacagacagcgcgctgaaagaaaatgaagacattttccgcgagcactgggcgaaagtcattccgccgactgataacaagtttgcggcgcttaactcagctgtttggtccggcggatctttcatctacgtgcctaaaggcgtgaaggttgaaacaccgcttcaagcttacttccgcatcaactccgaaaacatgggtcagttcgaacgtacgctgatcatcgttgacgaagaagcaagcgttcattacgtagagggctgtacggctcctgtgtacacaacaaactcgcttcacagcgcagttgttgaaatcattgtcaaaaaaggcggctactgccgttatacaacaattcaaaactgggcgaacaacgtttacaacttagtaacgaaacgtacggtttgtgaagaaaacgcgacgatggaatgggttgacggaaacatcggttctaaattgacgatgaaatatccggctgtcattctgaaaggtgaaggcgcgcgcggcatgacgctctctatcgctcttgcgggcaaagggcagcatcaggacgcaggtgcgaaaatgattcaccttgcaccgaatacgtcatccacaatcgtatcaaaatcgatttctaaacaaggcggaaaagtaacataccgcggtatcgtccacttcggacggaaagcggacggcgcccgttcaaacatcgagtgtgatacgctcattatggataacaaatcaacttctgatacaattccttacaatgaaatcctgaacgacaacatttcattggagcacgaagcaaaagtatcaaaagtttctgaagaacagcttttctacctgatgagccgcggtatttctgaagaagaagcaacagaaatgatcgttatgggcttcatcgagccattcacaaaagaacttccgatggaatacgcagttgaaatgaaccgtttgattaagttcgaaatggaaggttctatcggttaatagtaaaaccccgccatatggcggggtttttttgtttattgaatagtgaaattaccgtattcgcttgaccggacatgaatcggcccgtttaaattgtagttcttctctttgacaatatcgcggaaaacgtcgacacgggcaaccgattctctccattcatcctgagtgtcctcatctgacggattcatcagatcgtcatagcgcacatccaagaatttattgagccatttcttctcatcaattccatctttcggtgacccgcccatttttttgttcgtgcgtttaatcagggcataaaaggagtctggatcatcgccgtcgccatgctgaatcaccgtatcgtacatcaccgcttttgccaaggccgttttcagtccggcattttctgaacgtttcatcgccggctgataatacaagctgtcatttaccttatcttgggcagcgcggaaggctttatcattgccaagtgagcgccaagcagaagcgaatcctttcagattgctgatgtcatcgctttcgtccttcgcaagacgacgcaattcaggcaaatactttttcaatttgttattcggcaccgctttcgtgtatacttcgactacttccagcgcatctccggtagccgtcgtaaagccggcccgcccgcaagtgtaacctcttccgtcatccaacgcttcaacatatccgtattggatttccgtctttccgttttcaaagatgctggtcagctgttccgcccggcgcttctgatccgtattcagcccggccgcaaaaaccgtaccgctcatcatcagggtaaaaaacatggtgaaaataagtgacgaaaccgccgtcttcttccaaaaacctgcttttttcttcaagctgattttcattgccatacccctttcatatgtgagttacgcactcagtatacatgagggggttgttttttttaaacacacgaatttgtcaatattttgaatcctaagccctatccggcgcttcataaaaagaacgcaccttcatcagacagacaatccggttctcgcgtcattctcatctgtaacatagtcaacgcggtgaaacccgcattgtacagcctgctgataaagggcttcgagcatatccggatctttgcaatataacgttacatacgagcaatctgcaatgagaagcacaagctcacaggaactctccaaatattcatcatatgtattgatttccgttaccatcccgcccgagaaagctttcaattcagcaaaaatcatataataagggtctccttccagacgctgacggagttcttgaccctgaatgatgcgctgattttgcggaaataggtctgtatcggtgtcttctttgaattcagtatacgcctctccatcaccgataaaccacgcataggaagagatggggaacggttgtaatatatctgccgcaaaccgtccgaattcatttggaatgtcaaaagtaatgccgcgtttcataataaaatgaggaaatcgaataattaataactgactattttgaaattaaatccataggaactttattttattactgtaaaattgctataataatagctaatatatttctaaattggaggactattgttatgaaggggaaaaagattattatttgtttattggtcatctgtattattttcataatcagtttgttttttattaagaataatgaaactcctgattcagcgaaaaaatttaatactgaacatgaagctttacagtatgctaaacaagaatcaccttatatcactgattttatatatgaaacaaaggaaattgacaatgaaaaagttgtgatatacaaatttgaagaaaataaacaaatgggtataggaacaggaacattggcatggaaagataaaaaagttatatgggtaaagaatggaaatggtgtagcgcttaaaaatcagaataataagacggatatttcatttgatgtaaagtcgtattcaggtaaaaaatataagttatatgctggatttaacaaaacgaaaaatctgaaaattgaaactcagacagataacaatttaacccctcatgtggataagaaatccggaatatattatttgttaattcctagtataaattaatcacactcggtttacaaaaatatgctcctctggtaatattttaatgtgccataaaaataaggagggtgtatatgaaaaagaaagttacgcttttgattgcagttttcgtggtatttttgatgatttttggaaatccctcgaaaggattcgctgtcgagcaatatactattaatctatctgattcaaatgtagaaaaattttatgatgaggaacaaggtgcagtaatcgcaccattcaaagcgtcagaacatgggcttgtacctgtttcaaaagatgaatatgaaaaaacgactgaaataaaagaaaacgaagatttagagaatgagttttttgtttctgaggaaagcaatgacgaattagaatttaagccctatgctgacgttgatcttagatattggagatataaagaaaaatcagccactaaatattatggagaccctataaaagtttcagcaacaattaagtgtactacatcatcgtgcagagtcgataaacagacgcaagctactgtatctaagtcttacagtgttaatgcttcatcagaaattcaagctataaactatggagctagttttaattttacgtcagcaaaatcttattctactacatattcctttacgctcaaaaaaggccaatctggatatatagcctttaaaccatacaaaagaaagtctacaggtaccctaacgcagtattctacaatgcatggtaaaatcagcagtaaatcagcctatggaagatcagcgattaagatgaaaactggagaagctgatggatactatacttttgtttttactaaaaaatagtatgatagatcagtttatatagtggaaggataatagtgataatgcctttatcctccaatctttttttaaaaaaaaaggacggggttgatacttagccgcgttctttgatgttctcttttgttcttgatctgtatatacgttgactatgacttttgaattgatactaaacgaagagattggtcagccttccactttttcatatggggacaaaaggtcgaagcaaagtgctccatttgttaaaataaataagacaaaacagatagaaaaggtgttatacatgaagtcttatttgattatcggggccggcattctcggtgcgtccgcggcttatcatctcgcaaaggccggggcggatgtaacggtcattgaccggaagcacccggggcaggcgactgacgccgcggcggggatcgtctgcccgtggctgtcacagcgccgcaatcaggcatggtatgcgatcgcaaaaggcggagcccgttattatgaacgattgatacagcagcttgaagctgacggagaaacagaaaccggttatcaaaaggtcggtgctgtcagcctccatacggatgaaaaaaagctcagccaaatggaggaaagagcttataaaagaagagaggacgcccctgaaatcggtgacattacaagactgactccggaagaaacgaaggcgctgtttcccgcgctgtcggaggaatacggagcggttcatgtcagcggcgcggcccgggtgaacgggagagcgcttcgtaaggcgctgttaaatgcggccgttaagcacggagcggctgtttacaatgaagaagcgtcaatattgacagaggacggtgccgtcatcggtgtgaaaactgcagaacgcacgcttactgccgaccaggttctcgtaacggccggcgcttgggcgagagagctgcttgagccgctcggcatccgtttttcagtatcataccaaaaggcgcagatcgttcatttagagcttcagggagaggagacgggcggctggcccgtcgtcatgcccccaaacgatcaatacattctcgcctttgacagcggcagaatcatagcgggcgcgactcatgaaaacgataccggcatggatttgcgggtgacggccggcggtctccgcgagatttttgacaaagcattaaccgtggcgccggggctttcagacagtactatgatagagacaagagtcgggttcaggccgtttactcccggttttcttcccgtcatcggcaaagtgccgaatatcagcggactcctcgttgccaacgggctgggcgcctcaggactgacgagcgggccgtatctgggggctgaactggcgaaactcgcgctcgggcagcagacggaaattgatttgagcctttatgatccggccggggcgcttgaataaaaaatagcttttggcgcattcttatgataggatggagctttaatgaataagaggacgtgacccatttgataaaaataaaccttcctgctcctgatgtaaccattacggaacggcagcagtcaccgtcggagaatgaaccggcgattaaagcgatttacggtttcattgattttcaccaaattccgagagacaaaggcggcatctttatgttttataacattcatgatgagctgctgtttgtcgggaaagcccgtaaattaagacaaagaatcaaaaagcattttgaagacaatgtgtcgcctgttaaacatcacagggacgaagtgtataaaattgaagtatgtgtcgtaaatgatccgatggaaagggagatttacgaaacgtacgcgatcaatacccttcagtcgaaatacaacattgagaaagtattttataaataagaaaaaccggagcttaagggctccggttttctttatgtttacagtgccagccacatcacggcaatatgcacgatcagcagacagtaaacgacgaggaatagctggacgaccttttttctgaataacatgcagatcatcatgagcacgggaaaaatcaggacgccggctgttttattgattgatgtattcggacggttcgacacgtcatagtgaatggccatatcagcaggaagaaacggataaaacacaatcgaaagaataaaggcgagaaccacagctccccacagcactttatcattcatcaaaaacatatgaacactccccttttttacatataatagtatattagtctgaaaaatctaattaatcaatattttacttgttgaatggtgtataatcatgtcaatgaaatttccatacgctaggagggtttcaattgactgacaagaagcaaaccagcatgttttcattctttctttttatcatggccgcctggatcatcgttttgctttttaccatcatcgcggcattgccaagctccgccatccaattaaccaagcatcaatccaaaaccgtttccatgatttatccgcaaagctggggatttttcagtaaagatcccagagaagacagcttgaacatctatcttcttgatgccgatgaggagctcagatggccgaataattctctgaaaaatgtcatcggcttaaaccgctacggccggacgcaagggatagagctcggccttatgctggaaaagctgccttccaaagagaagtggaacgacttcacgactggccaagacattaaggataccacatttttgaaaatgaaaaatgagtctccctccccaaggctgaaagggaaaatgatcattacatatgaacgcattaccccatgggcatggagccagcataccgaaacgaaaagaaccatcaaaaaatacatcggagtggatgtcaattgattcaggatgcaaaaaaggagctcaccttatggatgatgaagaatccgccttggacaaatgtgtacgggcttgccagaagcttaatcgcgctcggcacgctgctgacattgctgttcaatccggcgtctgtcttcttcaaaacgcaaaatcaaatgctcagcttttccgacacgttcagcctgtttctgctgtttcccgatttccgttacattgagatcgtcaaagccgtttgtatctgtatgttaatccttgttgtcattggctggcggccccgcctcaccggtttttttcactggtggatttcgtacagcttccaaaactccgccgttactcttgacgggggagatcaagtggctgccgtttttacgctgctgctgcttccgctgacattaaccgatccgcggaaatggcactggtctccgtacgagacgtcttttgagaaaagaccgcttgagccttattaccgctccttatgctgggcgacactgacaatcatcagaatacaggtcgcgatgctgtactttaactctgtcattgccaaactgatggaagaagagtggcagaacggaaccgccgtttattactatttgaacgatccgatgctgggtctgccggatgcgcttcacggtctgtttgactttatcctgcagtccaagcttgtcatcatcccgacgtggggcacgctcattgtgcaaaccattatgttctgcgctttgttcgctccgaaaacatattggcgtttgatattgtttatctccatttttatgcacgaaatctttgccgttatgctggggcttacctcgttttccattacggtggctggtattttggtcctgtttttggtgccggcagagaaaacagtagctttgaaccattacaatcccctttttatcagatacaattttctcaataaaaggaaaaggaggaaattatatggttaaaagcaagaagtccgcagctgccatgatgctggtgtttgttttaatggtcgcattagtcggcccgcatgccgcggcgaaaactgagccgtcggtctcttattcgggtgaagacattttttccggcatctttttcggacaaggtgaggtcgcaaagctccttcctgaagtgtgggataccaaggctgttaaaaagattgatcaggatgaattaaagcaagtttccgatcaggtgatcgctgatattaaaaagtcatcgccggattattttaaagagttaaaagcggcggtctacagcggcgattatgaaaaagtgaacagcgtcattgatcaaggttcgcagattatggcgaaagtgctgaaagaagagtttgacaaaaagagcatggacaaaggaaaatcaacggccatcggccaatgcgcaacggctgtctgggtatttttaaacgcggcggccgccattgagacgatcgctcttgcggtagcggccatcattttgacagtagcaagcgttgacgaagattccgacttaggaaaagagcagctcatcgctaatgtcgttgaccgcattaacgcgcagcactgaggctgaagaaagaacacgctaaggagacgaaccttagcgtttttttgattgaagcatctgttttaaatatgcttctgaatcaaagccgagttcctcgtcggcttcttttttcagttcaagctgaagtcgcacgtacgtgtcatatttcgggctgagcttttgaagaagattgctgaaaggcgatcccgccttcagcgcgggcagatcagaagctgattctccgaccttgatcaggctttctctgtattcttcatctgtctgcactcttttcacaagctgaatgatgatgtttttatgagtgtcccaagtggcggggtctctctccaaaatccgctcgataaattgatcatgctggactttgtgctgctggagctgagccggatcttccttgccgaccagctgcatcatcgggtgtgcagccggaacttcttccatatcatccaatactttgataagctccgcccatatcgtttttttctcatctgtatcaatagaaaagtcgaggaacggttcaaacagcgcggcgataaattctccaaaatctcccgggaacagttttttcagctgaagtcccatatatttcggttcatctattttaacctcgccgatatcatgcagaatggaatcgacattttccgcatcttccacgcgcttgatcagcatttcagtcagtttccgttcctgttcaagctcttcaatctgccggctgagcttttgatgctgctggcgcagtatatcatgcagactgctgccctctaagaggaacgctttaatatcgcttacagacagtgccagcattcggagggcggcaatcattttcagcgtattcacgttctgagcggaatactcacggtatccgttatcagggtttttgctgacggtgattaaaccttcctgctcataatatttgatggcttttttcgtgagacccgtctgcctggcggcttcttttatattcattctgaatcactccctgcttttcattctaaacgtgtctctaagggtcaggtcaagagagggcgggaaataagacgtgtctattttatattttagaaatttcagaaaatattattgacaacacgcctttgttgcgattaatataacgttatataatgttatataacattatataataaaatactgaggagtgaaggatttgagtcaaactgccgcacaagtgaatcacaaggttcaggctttcttggatgatctgaaaggaaaaacgattgatcacgtctttttcgtcgcctgcggaggttcttcagccattatgtatccgagcaagtacgtgtttgacagagaggcgaaagccatcagctctgatctctacagttcaaatgaatttattcagcgcaatccggttcagctcggagagaactctctcgtgattttatgttctcagtcaggcaatacgccggaaacggtgaaagccgccggtttcgccagaaaaaaaggcgcgcttacaattgcgatgacctttgagcctgattcgccgttagcgaaagaagccgaatatgtcgcggtttatgactggggtgagaacgcacaggcgataaatacgaattacggagttctgtatcaaatcgtgttcggcgctttacacgtgctggaaaaccatcccgcgtttgagcaggccatcgacggactcaataagctccagaccgtatatgacaaagcgcttaaacaagaagcggatcacgcaaaggcattcgcgaaaacccacgaaaaagaagatatcatttacacgatggcaagcggtgcgaactacggcgtcgcttactcctacagcatctgcattctcatggaaatgcaatggattcattcccacgccattcatgccggagaatattttcacggaccgttcgaaatcattgatgaatccgttccatttattatcctgctcggcttagacgaaacaagaccccttgaagagcgggcgctttccttctcaaaaagatacggcaaaaaactgactgtgcttgatgcggcagcatatgatttttccggaattgacgattctgtaaaaggctacctggctcctctcgtattaaaccgggtgctcagaagctatgcggatgcgctggcggaagcaaggaaccatccgttaagcaagcggcgttacatgtggaaagtcgaatattaagaacgcgcattatatttcatcggactataatgatatataacgttatagtccggtgacaaaggaggaaaagcatctgaaaaagctcatctgcctgttcgttctgttagctgtatgtctgtcagccgccgcctgttcaagccaaagcagttcctctgacggaaaagtgaccctgaagttttttcacaggtggccgaaggagccggaaaaaagctattttgaagaagcggtcaaagaatttgaagccgctcatccggatattcatatccaaacggaagcggtcttaaacgattcttataaagacaaggtgaaagtcatgctcggaacaacgagcccccctgatattttcttttcatggagcgaccggtttgcttataaattcatcaaaggaaataaagccctcgatctgtcgtcttactatcagcaggataaagattggtcctcacagcttgtgcagtcacaaatcaaaccctttacgcatgacggaaaacagtacggtgttccgtggcaaatggacgctaaatcattcttttataataaggacatttttaatgcattacatttgaagcccccggcgacatgggatgaactgatcacagtctctgagaaattgaaaaagaacggatatattccgatcagtttcggcacaaaagcgccttggaccatttctcattatatcgggacgctgaaccagcgtatggtggatgaaaaaacgcgggcgaaggattacagcccggaaaccggggagtttacggacgaaggctatgtcaaagcgcttgaaaagcttcaggaacttctgccgtactttacaaagcacgtgaactccgtcgatcacgaatacgtgcgccagcagtttacgagcggcaaagcggcgatgatttatgcggaaacggcagaaattaagctcgtcgaaccggtcaatctgggcttgtttcctttcccgaaaatcagcggcgaaaagggatctccccgtgcactgaccggatctccggaaggatttatgatttcctcaaaaacgaagcacccgaaagaagccatggaatttctgcagtttttaacctcgaaaaaaatgggagagaagctgataaaagacgtcggtaaatacagcgcggttcaaggaacggcgacagaaaacaattccgccccgatccagcgcgaagccgtgcaggatatcgtccgcgcagaaacaatggtgccgtggtttgatatggatgttgacgttgaaatcgccgatgtgtatgcggcaggcgttcagcagatgctcggcggcacaatgacaccgcgcgaggtgatgaattccgtgcagaaagcggcgcgtcaggtcaaagcgtcatctgaatagaacagatttctttggagaaaggagatgaggatttccttggtcagccgaaaacgtttcattccgtatctgtttctcgcgcccgcgctgatttttctgctgttcgtttacattccgattattgagaatgtgtttttcagtctgtttgaatggagctcatttcaacccgaaaagacgtttatcggtctgaaaaattatattgacctgtttcacgatcccgtgttttttacagcactccgcaacaatgtgctgtatgcggtcatatcgctgattttccaggttggcggcggcttaattctggcggctgtgctggaagacagactggtaagaaaatggtcgccttttttccgtacggtcttttttcttccggtcgtcatttccatgaccgtcattgcgctgttgtttgattttatttataacccggaaatcgggcttttgaatcagctgctggaagccgtcagacttgatgaactgacccgggcgtggctgggcgatgaaaacaccgctatgctgtctgtcatttttgtgtctcaatggcagtctgtcggttacatcgccatgctgtacattgtctcgattcagagcattcccgctgaattatatgaatcggcgcagctggacggagccggaaaaatccagcagttttttcacattacggtgccgcagacgaaagaaatgtcgtttgttgccgtggtgatgacgctgaccggcgcatttaccgtatttaatgaaccgtatattctgaccggcggagggccgggcaatgcttcagaagtgctgagcacatttttgtataagagcgcttttacaaaggatatgatgggctacgcttctgcgatcgcgacggtggtgcttttgctgacgcttgctctgtcgcttattcagatgaaattctttaagaccggaaaggaggagtagccgatgcttcctgaaaagacggacttgcgtcatgcccgtcaggccgtcagaacaggcggaaaaccgagaaaatggtatgtcggggaaacatctgtgtggctgtttctctttatctacctcattgctgttgcatatccgctgttatggatggcggtcagcgcctttaaaagctcggatgagatttttgagcacagctggtcgctgccctctgtctggcatcccgaaaacttcgtatccgcatggaaccaagggatttccgcttattttatgaacagcgtcattgtgaccgtgctgacttgtctcatcaccgtatttgtgagcgcctgggcggcatacgggctggcccgttttcaatttaaaggaaaagggtttgtgctgatcatttgtcttggcggcttgatgctgacgccgcaggtcagtcttgtgccgctgtactccattatccagtcattgggactgtacaatacgtattgggcattgattcttccgtacgccgcctaccgtattccgtttaccgtgattctgatccgttcctattttttgtcgatttccaaagagcttgaggaagctgcctatctggatggatgtacaagtttcggaatatttttcagaatattcttacctatgagcgtgccgattctggtgacatcaggcattttgacggcttaccatacatggaatgagtttatgtttgcgattatttttatcgatgatgaaaatttacggacgattccggccgggctgatgcagttcagagatgcgctgcagacggattggggcgtgctgctggccgggctgacgatttctgctgctccgatcatagcgctgtttctattgatgcagagatattttatccgcggcattgcagcgggaagcgtgaaaggataaggaggatgaaaagatgaaactgatagcggccggagataatgtagtagattattatcaggatcaggaaacgttttacccgggcggaaatgcgttaaacgtagccgtgcttgcccggcgcttaggccacgaaacttcttatatcgggattctcggcagtgatgaagcggcggatcacgtattgaatgtgctgaaactggaaaaggtgaatgccgatctgatccgccgggcatacggagaaaacgggatggcggtcgtcacgcttgatgaaagaggggacagaatatttgccggatcaaataaaggcggcgtgcaatcgcgtctgacactcgcttttcaggagaatgacatctcatttatcgccggacatgatctgctgcatacgagcgtatacagcaggatagaacgtgacctcccgatgctgagcgggcatgtgccgatttcctttgacttctctgtaaaacgtgacgaagcctatttagaagcggtctgcccgtacgtgacgtatgcgtttttttccgggagtgatttgagtgaaagtgaatgtgagcggcttgccgaaaaagcccgcggtttcggagcgaaaatcgtctgtctgacaaggggagaatatggcgcggtgttatcggatggggaacgcgtctatcatcagccggtggtaagagctgatataatagatacattgggcgcgggtgattcttttatcgccgggtttcttaccgatttcttcgagcatcaggatattcggcgagcgcttactgcggccgccgggacggctgccaaaacatgcggagggttcggagcattcggttacgggcatccctacaggccgggcggcgggaaaagcagtgaaaaaacgagaatacgataagcattgtctcgttttttatacttgttacacatagggactgttaatggtaaacgtgacgcggtcggtatgcattacaaacagcgagctgtatatcggctggtcttttgacataaaagcggttttgtcaatttcaaaaagcgcatccccgatatcacaagccagatagcggctttcttcctgcttggcgtatacgacatttaacagcttcgtattatgggtgggcaccacctgatagtgctgtttcaaaatgtcatgcatcgacacgccgcctttaatatgcttgccgatgtcgggaaataaactaagcggatagtgggcgatttcgaatgagagcggctggtcgtcgtgaaataaaatgcgttttaattcaagaacgggactttcggaagcgacgcgaagtttttgggcgatggatttaggcgcttcaatgatttcatgggaaaggatctggtgtttcggttttttccccgttgattccataaattcagagtagccgttgaccgcgatgagctcccgcttcagtttagggcttttaacgaacgttccctttccctgctgccggacgagccagccttcttccacaagatcaaggatggccttcctgaccgttatgcggctgacgttgtacgtttcgcacagctcattttcagtcggcagttttacggacggcgaataaacgcccttcttgatatcatccgcgataatttgtttcagctgaatatataaaggtttcgagctcccgttatttaacaatgggacggacctcctttgtcaagtagtagtactattatatgtattatgacgttataatacaaatttgctttttatttatgaatctgtcagaaaccccgaacatttttaacataacagaaagatgtggcggtttccagtattggaggaggtttcgaatggcatcattaacatttaaccatatcaaaaaaacatacggcgcccaatcagcggcagtgaaggattttcacttagatgtaaaagatgaggagctgctggtgcttgtcggtccctccggctgcggcaaatctacgacactcagaatgattgccggactggagagcatttctgaggggaagctttatatcgacggagacgcggtaaacgatctgcccccgaaggatcgtgatatcgcgatggtttttcagaattacgcgctgtatccccacatgacggtgtttgacaatatggcgttcggtttgaagctcagaaagctgccgaaaaaagaaattgcagagcgagtccggacggccgctgatattttggaaatcgggcatctgctcaagcggaaaccgaaggctctttc

SEQ ID NO: 71 - DNA, 67069 bp, Bacillus amyloliquefaciens
tttttttattgcggtttagctgactggctttttttggactggtgcagacggattttgtaaacgatcaaaatcaaagcggcgacaacaagcccttctccgaccggcagaaacacaccgaaaaaagtcagtacggtgcagccgagcacgagaaagagataaactgccgcagccttcaacaccggcagccgtttggcaaagccgagtttaaatacaatcactgaaagcacgacgattgttccgtataacagccacattcccgtcagcggatgctcatccacttggtaaagagccgcaaagaacgacagccgttcacttacttcattcaaaaggatccccctccccttttccgttcgggttctacctcttcaaattctgcaagtgattaagacattcctgctgtttttttctttttcgccgctttttcacgttcgtttttattcaggattttctttcttaaacggatggattccggcgttacttcacagtattcatcttcgtttaagtactcgagtgattcttcaagcgacataatgcgcgctttcttaattgtagtcgtttgatccttcgtagcggaacggacgtttgtctgctgtttcattttgctgacattgacgacaaggtcattgtcacggttatgttcgccgacaatcatgccttcatatacttctgttccaggctcaacgaagatgacgccgcggtcttcaataccttgaattccgtaagatgtcgcttttccgttttccatggaaacgagcacaccctgacgtcggcctccgacttggcctttttgcatcggctgatagctgtcaaacgtgtggttcaggataccgaacccgcgtgtcagtgacagaaactcagtagaatagccgatgagtccgcgtgaaggtacggtaaagatcaggcggacctggccgtttccgttattaatcatatcaagcatttcgccttttctcgcacccattgattccataacagaaccggtatgctcttcaggcacgtcaatctgtacgcgctcaacaggctcgcagcttacgccttcgatttccttaatgataacttcaggtttagacacttgaagctcatagccttcacggcgcatgttttcaattaaaatggacaggtgaagctcaccgcgtcctgaaacaacccatgcgtcaggtgatgcagtcggttcgacacgaagactgacgtctgtttgaagctgcgcgttcagacgctcttcaattttgcgggctgtgacatatttgccttcacggcctgcaaacgggctgttgtttacaacaaatgtcatttgaagcgtaggctcatcaatgcgcagaaccggcagcggctcatggtggtcagccggacaaaccgtttcaccgacgttgatgtcttccatgcccgaaacggcaacgaggtctcccgctctcgcttcttcaatttccacgcgtttcaatccttggaaaccgaagattttcgttacgcggaatgattttaccgttccatcaagtttcatcaatgaaacctgctgacccactttcatcgtgccgcggaaaacgcgtccgataccgatacggccgacataatcattgtaatcaagcagcgccacttggaattgaagaggctcttcggcgttatctaccggggcagggacatgttcaagaatcgtttcatacagtgattccatattttcgtcctgctttttcggatccagacttgccgttccgttaatcgcagaagcgtagacgacagggaactcaagctgttgttcgtttgcgtcaagctcgatgaacaaatcaagcacttcatcaatgacttcttccgggcgggcgaaatcacggtcgattttgtttacgacgacaaccggatttaagttctgctcaagggcttttttcagtacgaaacgggtttgcggcatgcagccttcatatgcgtcaacgactaacagaacgccgtcaaccattttcataatccgttctacctctccgccgaagtcggcgtgtcccggagtgtccaaaatattaatgcgtgtatctttatagttaatcgcagtatttttcgcaagaattgtaataccgcgttcacgttcaagatcgtttgaatccattgcgcgttcggcaatattttcgttggcacggaatgttccggcttggtgaagcaattggtctaccaaagtcgttttcccatggtcaacgtgggcaataatcgcgatgttgcgaagatcgtttcgaagtttcacattttcatctcctaaaaaaattagataactttcatattataccacacatcctctttaaaagcgttacgtttttctgtaaactgaaagtatgacgttaaaggggatggaaatatgaaaaaattgaattggctcttattattatttgcattcgcagcagtcttcagcatgatgctgatcggcgtatcaatcgctgagaaaagcgcatggggcatcatcggaagcattgttctcgttatcgccatgatgggaagcggtttcaccgtaaagaaaaaaatgcgcgaacagggactgcttgattaaaagcatgaccctttgcaaaattccgtaaacatgaaaagcacaatatctaatgaagcctgaatcaaagactcaggcttttttacattctcaaaacaggctttagatgtaaggcttatctcccccgccgcctagtcaggaagccggaaatgacggcccccactctagttacatcagcagattccctcagaaaatgcagtctgaaatagtccggcatcgttatgcagaaaataccatacctcctatatcaattccatcattgtctttttatacttgtggctgtaagcaaatacacatgacaaggagagaacaaaatgaaaacatcttttttgaagaaaaccgctgtaactgccgccgcaaccgcctcagccgccttgcttgcattcagtccgcttgattctgccggcgcaaaaacgatccaggcaaatgagccgcatgccctgcaggcttccgcagagaaaacaccggaagacgcggcaaaactcattgacatcatcagccaatcgatttacgaaaaagacggtgtctattattttgacggtgaaaaagcggttgaattgggattagatcaagaacaagcccagatcattcaaaagctgtgggacagttcaaccgaatttttaaccgttctttcccaatgtattgagaaaacggacggcgaatatacatttaataaagaaaaagcggtggagctcggctttacggaaaaagaggcccttatcgttgatcagctgttcaccgctttttcccaaagtcttcatatccttcaatctgcgctgattgaagaagacggtgtgtatacgtttgatcaggaccttgctgaaaaagcgggagcaggaaaaaaagaagcaaagctgtgtgccggattctttaattcactgccccaggaattgcttgaaggcatttatacagcctttcatccggctgagtaaacggattaaaacgcccggtcattcagccgggcgtttttttaaatcagcagtttaaggatcagcatgataaagaaaacagcaccgaacatacaggctgcttttatcagcagtttcccgtaataccgttccttaaaccgcctttcttcttctgcataacaagctggcgccttcatcttagggctgccgaggtcaagcggctccttcatcatatgatataaactcccgcacttaccgcatgattcaagatgacgggaaataaaccgctccgtttctgtttcacaatcgccttcaatatataaagggagtaaatctctcactaaacagcaagtcatatctgtccgtccttccttttttccgccaagtgctgtttcagctgcattcttgccctgtacagggtgctcttcaccttcgaaagactccagtccaaaacatctgcaatctcttcgtaagacagctcttgaaatacctgtcgaaatgctgaataaaatgactaaaaatctctgacatctgaaacaatccttttcgtttattaaggcctcacccgtttagacaaacggctataaaaaaagttttacagatcggaacatttttcccctatcatttttcccgacttcatttgtcatttttttcagaataaatcgcatcattcgactcatgtctgattcaacacgtgcctctcggcttatcccccgatgctggccgccggaagcctttccgggacgattctatcaattcatcagcggagtctagttttatattgcagaatgagagaatgctggtttattataacaatataagttttcattattttcaaaaagggggatttattgtgggtttaggtaagaaattgtctgttgctgtcgccgcttcctttatgagtttaaccatcagtcttccgggtgttcaggccgctgagaatcctcagcttaaagaaaacctgacgaactttgtgccgaagcattctttggtgcaatctgaattgccttcagtcagtgacaaagcaatcaagcaatacttgaaacaaaacggcaaagtcttcaaaggcaacccttctgagagactgaagctgattgaccacacgactgatgatctcggctacaagcatttccgttatgtgcctgtcgttaacggtgtgcctgtgaaagactcacaagtcattattcacgtcgataaatccaacaatgtctatgcgattaacggtgaattaaacaacgatgcttctgccaaaacggcaaacagcaaaaaattatctgcaaatcaggcgctggatcatgcttttaaagcaatcggcaaatcacctgaagccgtctctaacggcaacgttgcaaacaaaaacaaagccgagctgaaagcagcggccacaaaagacggtaaataccgcctcgcctatgatgtaaccatccgctacatcgaaccggaaccagctaactgggaagtaaccgttgatgcggaaacagggaaagtcctgaaaaagcaaaacaaagtggagcatgccgctgcaaccggaacaggtacgactcttaaaggaaaaacggtctcattaaatatttcttctgaaagcggcaaatatgtaatgcgtgatctttctaaacctaccggaacgcaaattattacgtacgatcttcaaaaccgacaatataacctgccgggcacgctcgtatcaagcactacgaaccagttcacaacttcttctcagcgcgctgccgttgatgcgcattacaatctcggcaaagtgtacgattatttctatcagacgtttaaacgcaacagctacgacaataaaggcggcaaaatcgtatcttccgttcattacggcagcaaatacaataacgcggcctggatcggcgaccaaatgatttacggtgacggtgacggctcattcttctcgcctctttccggttcaatggacgtaacggcccatgaaatgacacatggtgttacacaggaaacagccaacctgaactatgaaaatcagccgggcgctttaaacgaatccttctctgatgtattcggatacttcaacgatactgaggactgggatatcggtgaagatattacggtcagccagccggctctccgcagtttatccactccgacaaaatacggacagcccgaccattacaaaaattatcgaaaccttccgaacactgatgccggcgactacggcggcgtgcatacaaacagcggaattccgaacaaagccgcttacaacacgattacaaaaatcggcgtgaaaaaagcggagcagatttactatcgcgcactgacggtatatctcactccgtcatcaaactttaaagatgcaaaagcagctttgattcaatcagcgcgggacctttacggctctcaagacgctgcaagcgtagaagcggcctggaatgcggtcggcttgtaaacaagaaaagagaccggagaaatccggtctcttttttatatctgaaacatttcacaatggcttcaccatgatcatatatgtcttttcccgatcgtctttttcaagcttgagctgttcaaagccgcattggcttaaaaacaaaacccattcctgcctgtccaggggaacggctgaaaacatcgctttatgctctcctctcagccggcccgcaatctcttcaatgaccgcgcgtccgattcctttctcttttgcctccggagcgacggccacggttccgagccacggttttccgtttgaaggggcccattccaaatgaaaactgacggcggcaggagcgccgtcaatctcccatacgagccacgttccattgtacatggagtatgcaagcataaactccgccgcattttttgttccgaactcttcgtttttccacaccgggtgtgatgccgccagctgctccagaaaaccgagatctttctcttcaaaatctctacctgtcagcatgtaaatagtcgtcaaagataattttatgtattgccggattgcccgcaagcacgctgtggttgtctaaaaacgtaaacggttcgccgtctgtggtcgtgtaaatgcccccgacttcgttcagcagcacgcagccggcagcgtaatcccacggcgcgagcctcatcgtaatgtatgcgtcaatgcggccggcggcaacactggccagctcaagtgccgccgaaccataggaacgcgttcctctgacccgttttacgagcggcgccaaaatactcgggtcaatccttctgttttccgtcacccatgtggcattgattgcaataatggcttcttcaatggaagcttcttttaaaggagcaagcggcgtattgttcagataagctccttttccgctgaatgcgtgatacagctcgtcctgcatcacatcataaattaagccgattttgccttttccgtcttcaaagatgccgatggagatcgcgaaatgccgcttttgatggacaaaattcatcgtcccgtcgatcggatcaatgatccagacgattccgtcaagggagcggagtttatccccctgcccttcttctccgagaatccggtgtccgggaaaagttccctgtatacggtcaatgaaaaagcgctccgtctctttatcaatatttgtgactaaatcattcggatttgattttgtttcaatcgtcaagcttttctgcatggattgtctgattctcgttccggcttcttttacccacttttttgcgatatcatcaatttccgtccaatttgtcataccgtgtacctcttttctatgtatagcttattctatagcatactgataaaggcgatgaaaaagcaaggaaaatgaaaaaaatgccttctcacgtaaaaacgaaccatttcctgcggttcgtttttactattctttatccgttaagccgaatccattcttttctgagacgttccagttttcttttgctgagatcgatttgatctgcattctctttttgcatggcctcatacagggttgccaattcataatcaacctctagtctccagacagctacacggttatttttttcctccctgaatccttccttcaccacttgcctcattgtctttcgccccttccagagatcatttgttaaaaaagcatcccatttttccaatttattaatgatacttcttatatcgtatggaaacttatattcggctgtaacaacattcttaaaattgtgtgtttacctattcgttttttaccaccaatcctctcggctcaaacgttctcaatgtttttgcggccggcggcggctgtggtaaaatatgaatacttacgataaggaggaaaaagatgactcagatgcgttttacaaaagaagacttcgatacatttacaatagaaggtttagatccgcgcatggaggtgttaaaagaacaagtccgtccgaagctgaccttgttaggagagcatttcgcaccgacattgtcagcattgacaggagatgaaatgttcccgcatgtcgccaagcacgcgagaagatctgtcaacccgccggctgacagctgggttgcctttgccaacagcaaacgcgggtataaaaaactccctcactttcagatcggtttatgggacacccatatgtttgtatggtttgccatcatttatgaatctccgataaaagaggaatacggcagattgctggaagcgaagcaggaggacatcacaaaacagattcccggtcattttgtatggtccccggatcatacgaagccaggggcgtacaagcagtccgacatggatcaggagcagctgaaaacattatttgaacgcctgcagacagtgaaaaaagcagagcttttgtgcggcattcagctgcaaaaagaagacgtgatcaacatgaacaacaatgaattcctgcaaaccattgaagatgcttttaggaagctttcctttttatacacactgactcagaaagtctcataacataaaaagcgggccgattgccggctcgctttgtctacattttgataatcgcttgatctgattgtttcgcctgtttcacagtccgatacggggaataggtgctgtcagcttcaaattggctgcagattttcttttcttccgctttcccgggaacgatttctttaaagcggcggtacgtattcagaagtctgtctcggtcagcccctttttcataggcgttttccacctgctgaaaaaaagcaatgacatccacggcctcctctgtcgtccagtcctcattcatcggatattgatattccaaatgtcttcactcctttataatcatgctcaaaaaaagcatcttccatagatcataaattgttctttactttctttcaagttcataatataattcatttgttttacgtttaaaaaacgggtaataaaactgaatgtaatacaaactaatccgtaggtattatgataaaggtgggaaaacaattgccgcaacatgaaacacccctgtacagcggactgaaaaagcacgcggacagacagcctgtccaattccacattccgggccataaaaaaggcgcgggaatggatccggaattcagacaatttatcggagaaaacgcgttaagtatagatttaattaatatcgaacccctggatgatttacatgcgccaaagggcatcattaaagaagctcaggatctggccgcggaagcattcggcgcagaccatacctttttttccgtacaagggacgagcggcgccattatgacgatggtcatggccgtatgcggacccggagataaaatcatcatcccgagaaacgttcataaatccattatgtcggccattgtattttccggagcggtgccgatttttatacacccggaaattgacgatgagctcggaatttctcacggcattacgcttgagtccgcagagcgggctttgacggagcaccctgacgcaaaaggcctgcttgtcataaatccgacgtacttcggtgtggcagcggacttgagcagcattgtaaagctcgcgcattctttcaatgtgcctgtgcttgtcgatgaagcgcacggcgttcatattcattttcatgataagcttcctctgtccgccatgcaggcgggcgctgatatggcagccacaagcgtgcacaaattgggaggctccctgacgcagagctccattttaaatgtgagagaaggtcttgtttccaaagaaagagtacagtcgattttaagcatgctgacgacaacgtcaacatcctatctgcttctcgcttcactggatgtcgcaagaaagcgcctcgctacagaaggccgcgatcttcttgaagatacgattctgctggcggatcagacacgggaacgcctcaatcaaattgaaggcatccgctgtgtcggcgaagaaatcacagggtctaaagctgcattcagttatgatccgactaaattaatcatttcggtcaaaaacctcggcctgacgggccatgacgttgaaaaatggctccgcgaatcatataatatcgaagtcgagctgtccgatttgtataatattttatgtattttcacccccggagacagagcgggagatgccgaccgtcttgtaagcgcgcttacagacatttcaaagcaggcttccgacaatgactatgctcatcagcaaaccgaagttctgcttcctgaaattcctctgttagcgatgacgccaagagacgcgttttacgcaaatacggaagtcattccgttaaaagaatccgcgggacggatcatcgcagagtttgtcatggtgtacccgccgggaattccgatctttattccgggtgagatcattactgaagaaaatatcagctacatttttaaaaacttggacgccggccttcctgtgcagggtcccgaagatgcaacgcttgaaatgatcagagtgatcaaagagcaaaaagccatccaataaacataaagaagcccgaaacgaaatcgtttcgggcctttttacgctttttactcttcttcaagatgacactggcattgtccgcagcatgttccgtataacgtcgtgaccttctcatcctcaaagtaatgaatcgcttcgttacagtcttggcaaacaattgtacccatctgtcattccccatttctcagaatttgaaaacgcttaatttttacttgttgttattatattattatgtcacatttaatatgtcaactgataaattgtataacacatttattttttacggtctttttatagctcgagggtcaatcacagtatatcctttatgacgcaatccttttacaatgtccggcatggcttctgccgtccatttccggtcatgcatcaatatgttggccccgtcccgcagataaggactgttcagtgtgatatcggtaagcgcttttttggattgatatttctgatcccaatcatacccgaaggtccagttcattttcaccataccttctttttttataagtctgtcactgtagtccgtattgcttccgaaaggcgccctgaaaaatgcgggtttctctcctattaccttttcaaccgctttattgacgccaatgatttcttcccgttgtttttgttcggaaagatcttttaagttttgatgagtcattgtatgatttccgatcataaaacctaactcatgaatatgcttaagcgctttcttattttcatcttttttcaaaaaatgtccgttcacaaaaaagatcgctgatgcattgagatcgtgcagtttgtccgcaatctcagcggcatgctgatcaggcgcgtcatcgatcgttaccaatgcgatcggttttttctctttctgttcatccattttttccacagaaaaacttttcggattgatatagtaacggggctccgccttttgttttttctgtttttcctcttttgtatgatggttttcccgtttggcgtgattggccgcggcttgagaatggggtttgtttgtttgcatcttttcgtttgattggcagccggcgagtaagcacatacatatgacggctgcaacggctttatacatgacaatccctcctgatatggttttgcccccagtataacgaaaaaacagcgctctcacgaaaaacaatgtgccttttttacacatcggctgcgcaagttgtcacacgtattatttcttcattaaaaacggtttcaattatataacaattcagtaacaagccttaggtttttcacctctcgtgatacacttgatatagtccttataaatggatgaaccaatatattatataaaacagaggagtaagatagatgcgctaccgtacggtgattcccttttttttgatgctgttcgttctgtcaagctgttcggtttctactgtcagtccattcacaaaaaaccggatcgacagcattcatcacactcaaatcttgtttttttccgatgaaaatcatatagataaagaagtgccttattacgatgcgatccttgatttagaaaagaaatatccccatcatgttgatcaaatgaaggtttatgacaacagaaagggatgggaagaggaaatcaacacgttccctgcgctgatggtgatcaatcatcggcatgtggtcatgaagattgagggatccgtaaagaaaaaagaggatatcatcaaacctatgcagcatgtgcttgcacaataaaaacagcccccgcttttacaaacgggggctgtttctttgttacattattattttacgatatggatcgggcttccgattgctacttcggcagcttccatagtgatttcgcccaatgtcgggtgagcgtgaattgtcattgcgatatcttcagcagtcattccgccttcgatcgccagactcaattcagaaatcatgtcagaagcgcttgcgccggcaatttgcgcaccgattacaagaccgtcttctttacgagtgatcagcttcatgaagccgtcagtttcgttaagagacagcgcacgtccgttcgctgcaaacgggaacttagctgcaacgacttcaatgccttcttctttcgcctgtgcttcagtgtaaccgacagaagccagttcaggctcagagaatacaaccgccggaataccgaggtaatcgatttcagccggctctcctgaaatagcttccgcagcgattttaccttcgtaagacgctttgtgagccaatggaggtccgtcaatgatgtcaccgattgcgtaaatgttcggtacgtttgtgcggcactgcttgtctgttttaatgacaccgcggtcagtcatttcgataccgacttgctcaaggccgagctcatcagtgttcggacggcgtccgacagtgattaatacgtaatcagcatcaaccgttttttcttcgccttttacttcgaatgtaactgttacgccgtcaggtctttcctcaacgcctttagccatggcgcttgtatggatttcaacgttgccttttttcttcagtctgcgggtaacgagagaactcatttgtttttcgaagccaggaagaatttcatctccgccttctaaaataaccaattcagttccgaagttcgcatacgctgttccaagctcagtaccgatatatccgccgccgataacaacgagctttttcggaatttctttaagcgcaagtgcgcctgtagagttcagaacgcgttcgctatatttgaagtttggcaattcgatagggcgagaaccggtagcaatgattgcgtttttaaatgtgtatgtttgcgcagagttctcatccattacacggacagagttgctgtctacgaaataagcttccccttttataacgtccactttatttccttttaaaagacctgcaacaccgccggtaagcttatttacaacagaagctttccattcttggacttttgtaaagtcaaccgttacgttctcagcagtgattcccatgtcatctgaatgttttgcattctcgtaacgatggcctgcattgatgagcgcttttgaaggaatacagccgacgttcagacaaacgcctccaagagttgctttttcaacgactgttactttttgtccaagctgagcagcgcggatggcagctacatagccgccgggtcccgcaccaatcacaagagtatctgtttcaatagggaaatctcctactaccataacattacgcctccattaaaataagttgtggatcgttcagtaaacgcttgatgtggtttaacgcattttgtgcagttgctccgtcaatcatacggtggtcaaagctgagagaaagagctaagacaggagcagctacaatttcaccgtcacggacgatcgctttttcagcaatacggccgataccgagaatcgcaacctctgggtggttgataaccggtgtgaaccattggcctccggcagaaccgatatttgtgatcgtgcaagaagcgcctttcatttccgcaggtgcaagcttgccttcacgcgcttttgtagcaaggctgttgatttcatcagagatttcgaaaacggctttacggtcggcatttttcactaccggcacaagcaggcctttttcggtatccgctgcaattccgatgttgaagtaatgtttttggatcacttcatctgttttatcatcaatagatgtgtttaaaacagggaattttttcaaagcggatgttaatgctttgacgacgtaaggcagataagtcagcttgatgccttgatcagcagcaacttgtttgaactgtttgcggtgagcaacaagatttgttacgtcaacttcatccataagagttacgtgcggtgcagtatgcttagagttcaccattgctttcgcgatcgctttacggataccgctcattttttcgcgtgtttcagggaattcgccttcaggagcctgagccgctgcaggtttagctgtttcctgaggtgcagctgtttcttgcggtgccgcttcttgagccgctcctccatttgcaaagctgtcgatatcttcttttacaacacgtccgttattgcctgaacctgttactttacggatatccacgcctttttcacgggcatatttgcgtacggaaggcatcgcgatcacgcgtttgttcggatcagcttccgcttggtcctgctgtcctgcgccggtttcttttgcaggctctttaggagtctcttctttagagatatcctgccctgcttcagcagacgactgaacttgagcttcagttttcgcatctcctgaatcatggcttcctttaaattgaagatcttcgtaaccaggtgcgtcaaacgtaataatcgtttgtccaacagttgcaactgttccctcttcaacttttaattctaatacttttcctttaacaggtgaaggaatttctaccactgctttatcattttgcacttcagccagaacatcgtcttcttctacctcgtcgttcggcttaacaaaccattttacgatttcgccttcgtggataccttccccgatatccggaagtttaaattcaaatgccacagttttcgacctcctagttgattaagcaaattttagttatgcatacgcaagcattgaacctagtaaacagactccttcataataagagaaaaggactctctttaccgtcttttatgatgcctgattaaaattcaagaacttttttcgcagtttcaagaacgtctttatggtttggaagccatacgctctcagcaagcgagaaaggaaatactgtatcaggcgccgcaacacgcagaaccggagcttccaggctcagaatcgcgcggtcattgatttcagctacaacgttggcagcgatgccggcttgtttttgagcttcttgcacgacaattgcgcggcctgttttttcaacagaagcaataatcgtatcaatatcaagcggacttacagtgcgaaggtcgataacttcagcagaaacgccttctttttcaagctcctcagcagccttaagcgactcatgaaccatcgcgccgtatgtgatgatagaaaggtcagtaccttcgcgtttcacatcagctttgccaagctcgattgtgtattcctcctcaggaacttcctgacggaaagaacggtaaagtttcatatgctctaagaaaacaaccggatcattgtctctgatagaggcaatcagcagtccttttgcatcgtaaggagtggaagggataacaactttaatacccggctgctgagcgataaggccttccaaactgtcagcgtgaagttcaggtgtatgaacccctccgccgaatggagaacggattgtcaccggagaagtccagcgtccgccggaacggtagcggagacgagccatttgtcctgagattgaatccattacttcatatacgaatccgaagaattggatttccataacaggacggtaatcttgcaggcctaaaccgagagcgagaccgccgataccggattcagcaagcggcgtgtcaaatacgcggtcctcaccgaattctttttgaaggccttcagttgcacggaatacgcctccggcaacgcctacatcttccccgaaaagcagaacgttttcattgtttttcagttctgtgcgtaacgcatcagtgattgcttgaatcattgtcatttgcgccatggcttacttcgactccttcgctttgtaaatttcaagttgttctttcaagttgaacgtcggctcttcaaacatattctcaatcagctctgttactttcggttttgattcgccgtcagcctttttgatagcttgtttgatttcttctttggcctgttcaatcactttgttctcttcttcttcagaccatagtcctttgttttccaagaacttgcggaaacgtacgagcgggtctttttgctcccattcattttctatttctttcgtacgatatttagtcggatcgtcaccggacattgtatgaggtccgtaacggaatgtaagagtttcaatcagagtcggaccttcaccgttaattgcgcgctggcgtgcttctgcggttgcagcataaacggctagtgcatccattccgtctacttgaacacctgtaataccgacggcaactgctttttgggcaattgtctgtgcagatgattgcttttctacaggagttgaaatcgcatagcggttattctgaacaacgaagatcgctggcgctttaaatgctccggcaaagttcattccttcatagaagtcaccttgagaagctccgccgtcaccagtgtaagtaatagctaccgcttttttaccgcgctttttaagccctaaagctacacctgcggtttgaataatttgagcaccaataataatttgaggtgataaagcatttactccctcaggcatctgattacctttaaaatggcctcttgagaacaggaatgcctgatgtaaaggaagaccgtgccaaatcagctgaggaacgtcacgataacccggaaggataaaatcgtcctgttcaagcgcgaagtgtgatgcaatttgagaagcttcctggcccgctgtcggtgcatagaaacctaaacgtccttgacgggaaagagaaattgaacgctggtctaaaatgcggatatacaccattcttctcattaattcctttaactgatcatctgaaagatcaggcattgcgtctttatttacgacttcaccttcagcatttaaaatttggaacgtttcaaactgcttatgaatagcatcaaattgttttttgctatcaacaattgaagtttttgtctttgcagccattttttaaaccacctcttcttttgatttaacagggttaggataccgtttagccatccgtattaaaaacagtcttatcatgctctgcaattctaaaattaatcattcagaaattcacatagcgcttaagcaaagataatgacgtttaaactgtactaataaaaaaagattttttattagtacaatatgatcaacaaccatagtttacagtaattaaacaaagccgtcaatcatttataacctcattttgaaaccgcttataaaacttaagatcatattgcgccaaactgtactataaaagactttgaactgtattataaaaatgctctactgtactataattaaaaaaaattacaaagagtaaattaagttatttaacttaggggcgggctttgaaaagatgccgcgggataaaaacgggcagttagcaatcgtcccgcctgccgaacagacgggacgatgcttttgtctaattattcaatacctgcccacacgatattcagcggcgtcagcacggcatgaggatgaaactcggaaatcggagtgaaaaatacatacgtaaaatcttcggctggatcagaaaacatgccgcaccaacccattccaagatgtgagaaggttccttctgtcatgaaataatggtcaccggccggccacaaattaatgcctaaaccaaagccgccttcctctctgggcgctccgaagaagtaaaaaggaagaccgggctttatttgatttctcagcatcgcctcgactgtttttcttccaagcagcttcttatctttcaatctgcctttatttctaaacatttcagctaacttccaaatatctcgcaacgaagagtacagaccgcttgtcgctttattcggaaaatacgggtgatgacttttttccagctgtacgcactcgtgctcattgatcacacaaacttcttcttttaaagcatcaggcacataaaaatacgttctttctaatcctagcgtttcaataatatgctttgttacatactgttcgtaggatacgcctgttacttttgaaataatgatgccaagtataacaaaaccggttctggaatagttccacgcttcatccgctccgtactccaaaggcgtactgacgagatagtttatccattcttcctcattcgttaagtcaatgccttcagccttttgaatatccagctcaaaacttagtcccgccgtatgagtcaaaaggtgcaaaattttaatttcttcgaaacccggtttatcaaacgcaggcaaaatgagcttgaccggcattttcagatcgagcaaacctttttcgacgagctgcatgacggctacagcggtaaacacttttgtcaaagaaccgatttctctgattgtatcaagctgaaatgtttgcttttctttttgtccgccggtaaattcccctaacgactcagctgcaaaaacctcacctcctcttgacatcatataactcgcacattgcagaactccattgtctatcatcgtctgataatggctgttaagagcgttaatttgtttcatatcaaatgccggattgcttattgtttgtttcattgttttctccccctgtactgtatgtatcgttttcatcctttacttaccgatttcttgatgaattctgacaccgctttattaaattcttccggatgtgtgaggttcggaagatgccccgctcccttaattttctttaattctgcattgctcagcagtttccgcagcctttttgtttctttctgatcaactacgctttccttctcacctgtaaggataagcgttcttgtatgaatgtcttttaaaaagccgatcgtagaatagccttcttgttgatgtatcttcataaaacgttcaatagaagcatttaagaattgattactgtataaactttcatattcatgcgattttcctatagctataaaatcatttttcagtttttcctcgacactgctttcagggtcttcttcgtattcggtgtaacttccggaaagaatgagtgtttttactttttcagggtattcataggctatcctctgccctatcatgcctccccaagaagctgccgcaatgtggatcggccaagcaacccctatctcgttcagcacttcgataaaagtctgagccagcccgctcagtgtaaaatcggcgctcccctcactcagcccgtaacccggtgtgtgtatgacaatgacattaaattgatctgcccattccttcatttgttctttccacatgtaagcagtggtagcaaaaccgcaaatcagtaaaattgtttcgcccttaccgctcatcaatatttccatatgccgggcattttctgtgtttgccagaaaatgaacggtttccgtttcttctgtctggtaaaaagcgatgagtttttttgcggcatcgctttgatcgtgctgaagggctcctttcttcagtctgctccaataatgcaaataatcgtcgagatgacgattggaagccgtgccgagtattcggaaaggactttcagctttttccgtaacgattgacgaagcatcaaaatcggctgcaagcgctgaatctcttactagaggcggtgctgaacgggcggataacggcttgaaatcgttttgtattttttctttttctccgtataacacgatcagctggtggccttggccgagaagcgagtgttcaaacgctttgattccggcagtattttccaatgggtgaagcccgtactccattttcataatatcttgaatgccgggatcaactgacatgcctccgtctttccagaaaggccaatttacagcgatggtttttcctgatcttccccccgcctttctcatacattccctccactcggcaaaatgctccagaaaacgattggcgtaggcgtaatcggcttgacccagacttccgatttctgaggagatggaagaaaacaaaacaaaaaagtctaaaggcatatctctgagcgcttcatccaaatgaatcacaccattgacctttgattgcagcaccgcttgagcttccgcgtctgttttattcataatgagagagtcttttaacacgcctgcactgtaaatgaccccgttgatttcggaataatcagcatgaattttttccgctaacttgatgacctgctgcttatctgacatgtcagcctgaatataagaaatgcttgccccgtcatatcggatgctgtctaatttttcttccatgtctgctgtcattttcgatcgtccggcaatgataacgctggctctgtgatttgcataaagaaacgctgaaataatccagccgatgccgcttaaccctccgatgatgagatacaccccgttttttgcaaactttgcggccttttgccctggttgcagcgaagcgtctttatatgctgtcacccaccttttttgatcgccgtcatatttcacagcctgatgatgtccggcacttaattcattgagaagcaaaggtgctttttcaatggcttgtcttgaagaaatctcaaccggtttacactttatattcggctgctccgcattcagcgttttaaaaaagcctccaatcgcggcgtaaaccggatttgtatattgacccttgtcatgtacatacagaatgttgatgttttcttttactttttgatggatcaaagctttgctcaaataaagaattgaataaaagctgtgagtcagatctaacgctgcttcagtataagctttttttgacaggtaatgaatgattgacgacgaaaacgctccggactttttcatatcttctaacagtctggtgtaatgagcagactgctccggattaaatttataatgcttttcatttaccatttcatattcatcggcggcttccgcataaataacattttcactgccgatgtactttcggatttcatcactcaatgaactgtcgaaatcgaaaatcaatgtattttccttagggacttctccggactttaatggcgattctatccattctttttgtaaatacaaagattcaagcatcggcttttcagacggctctttcgtttgcgttttttctttaaaagctgcggccggcgtattacgcacatcatatttttcttctaaataagccgctaaatcatgaatattgttataatcaaaaagcaatgtcggatacaattgtgtatccaatctttcctcgagaattttcgatatatgcagcagctgttttgagtcaagacccagttcgtaaaaagattggtgtttgtccgctttatttggcggtgtgtttgtaacctctccaataatggatgacagctcatctgttaatgttttatgactttcttggtgcaaaactgtaacagagatagagtctgtaatgtcggctccgtatttctcctgcagatattccgtcaattcaccgattgtggagtaatcaaataataaagtcgggtacagctttgtatctaacatcagttctaattttttggataagtctaataattgtttagaatccaagcccatctcgtaaaaggaaatatcattcttcactgtttcagcaggtttttcaatcatgccggctatctcttggatcaaattatttctgatcatttctttactgttcgttgcgctgccgacctctttagctttttgggaatgctccagcctttgtattgatttttcatttctgactcttttcacaccgaatcgctcataataaaaagcaagcaccccatcaggtctgtatacttctatgtccgcatataaaatgtctttagaaggcggctgcattatactgtttttatcaatatacacaaaacaagacccagttgttttatgcagtgcccggaacgtctcaatatatatagggataaacgcatttgttccttcagctggcaagtctgatgtaaggattcccaacaagctgagagacccatccaaaaatgcgggatgcatgtaaaagtcatctgtatattcttttgaaagtccgcttaaactgacctctcccagaatataattttcaccttcatatactgtaccttccaatttcataaaatctttatgaatcaggccgcccctgcgcaaattacgataggcggattcagcatccgtagtccggacggcccctttctttaattcttcgattgaaattgtcttttcgtttatcgcattttttcttatgatttccgcctgcaagttgactgacgcttcaccttccgccttttcagcgacccatttcctgcttgttgtttcaacaagccagccgttttcttgttccgtaaactggaagctgacttttttatcaaaatggactgacgtcgcaacaggttcacggaataaaacatgtttgatttcaaaacttcggggcgatatccctttctcagctaaaaatcgtgttattaaatccagatacgttacgccgggtatcgtacgcacttgatgaaggacatggtctgaaacaatataatcgtcatgtttgactaatacgctgaacctcatgcaactcgacaacctttcttcttttacaaagtaaagaaacagagcaggtgctactctgtttcatcaataatttcaagaagccgttttttattttgtttgatttgttttttccgatttgaatccggccagtactcttttctgacaaactcggcaggcggcagcggagttctgacggaatgatatgaatcatccaggccgcttaccaaaaggtgggcgtttgttccgccaaaaccgaaagcgctgatgcccgccctccgttttccatccttccagcttctcagctctgtattcggataaaaaggcgacttttcaaattcaaagcggggatttggcgtttcacaattcaatgtaggcggaatttccttatgccatattgataaaatcactttaatgaaacttgccgctccggcagcgcttaataagtgtccgatattggtttttacacttcctactccgcaaaattgcgttttgtttgtgtctcttcggaatacttttgtcagagcctgaagctcaatcggatctccaatcatcgtgcctgtgccgtgagtttcgacgtagctgactgatccgggagtgatatcggctttttcaaatgcatcttgaataacctgctcttgaagcttaggattcggggtcgtaattcccattgtcgcaccgtcgttattaatagctgatgcttcaatgataccgtatatccgatctccgtcagctttcgctttctccagcggttttaacagaacagcgccaaaaccctctccgggtacaaagccgtttgccctttcatcaaaagtaaaacactgaccgtccggcgaaagggctcctccttctgttaacatcaggtaaggaatttcatccaaaagcagatccgcccctcctgccagcgccatctctgaatcaccgttttttatgctttggcaggctaaatgaatgctgactaatgaagaagaacaagcggtatcagaaaccatgcttggaccgtgaaaattaaagaaatgcgacacatgtgaagcaataaagttttgactaagcccgacgatgtggctgctgctttctttcggcagtttgtgaccgtagccgcccattctggaaccgacaaatacgccgactttttttcccgataattccgtttcttcataaccggcatcccgtacagtctgtacactcgtttctaagaaatgtcttatcagcgggtccgtttggatggctttctcctcttccatgcggaaatactccggatcgaagctgccgattccattgataaaccctccccatttgctgatgctttttcccttttgctgcaccggagagtaattttcttctatattccaccgggaatcaggtacttctttaatatgattcttcccttttctcagattgtcccaaaattcctctttatcagccgctccagggaacttacatccgattccgataacagctatctttgcagaggaagccatctgcggttctgtatttcggctcgtcacagactgcatatcttgctgattgctgctttgagaatcagtctgttcgatttgttttttcaacggcggcgccgtcttaccgatatattccgcaagaccatgaatcgtgttgtgttcaagaagcacagtagggtcaatttttttctgaatcattgcttctatacgatgtataatgctgacaagaagtatagaatccacaccgtattcctgaaaatccgtatttgggttaagcttttcaaggggaatgctcaattcctcggcaaatacggcagaaagttcactgacaagcccttctgaacgatcaaaagtgtcgggcgtctcctgtcttcggactggaaccgaagctccgccggttttattgatgttcaggagactgtctgcatgaaacactgttccttttttcacgataggaatgatattggccgattttctctccagtgcatgatacaaaatcgccagtccttcccgtgtggaaagagagtccaatcccaattcatcatataaaggactcgtcacagtacccattccgacttctttccagctcggccaattgatggacgtgaaatacgttctccccttttgaaaatgataagccgcaaaatagtccatatatgcgtttgcagacgcgtaatcagtcattcctttcgacagtttgggtgactgtgcagcaattgatgaaaatagaataaagaaatccagcggcctattattaaaaatccgctccaaattctgaagtccagtgactttcggcccgtacaccgtcttaaattcactcattcttttatgaataaaggccggatttccgccgctgtgcagtccggcacagtgtatgacaccgcttatatctttaaattcaaggcttacttggtgaaagaatgaacgcagcttctcttcatttgtgagagaaccgctgtaatacagatagttgacacctttctcttcaaaactttgaaacagttttatattgctgactgtcttttcgtcctgtctgccctctttcagcaaatgatcccattcacttcgcaaaggtaatggacgcgtacccgtcagcacgagttttttcactccccgtttcaccaaatcttcagctattgctttgccaatgccccctgtcccgccggtaatcacgatggctttatccgcaggaaatgaaacaggctcgccagtatggattctttcttcttcaaaatacggaacatatctgacgccgctgcggtagcatacttcattctctccggtacattgcgccctttcattctcaaagatttgtttcagctcatgcgtttctttttctttcatgctgtctatatctattgttttcacatgaacaaagccgtattccgcagaaagggctttcagaaaagccgctgattctgcccccgtcagctttggtttttccgctttaaatacctgcaagccattggtgatttgtaaaatggataatggtgtttcctttttactcctcttaattatttcttgtataaataagaatttaccatatgggatgccgttctgattttcactctggtttccgatatctgagaaatcaaatatattttcgacctgccgctcaccgcccgagaagatctcacggataacgtcgtatgcgtggttttcatctaataaagaacactcaaacatttgatcagagtgttttataaatgaagagtgatgttttatgacaatcagattctcctgatctatatccgaacaaatggtgcgggcaattgattctgtgtcttgatttacaaatgctactgtcagtccgtactcttttgtttcggatggatttacaaacggattctccctccattttttttgcaagtaatgttgaaaagaatgctgagggatctctgccttctcagtcctggacggaacccaataacgttctttcgcaaacggataagtcggaattgagatccgtttacccggctgctgtaaatgttgatgaacggatttccagtcgatatccgccccccaaacccataattgagccagcttttccgcttcaccgttctcaataatggtctttacaaacaattcacctgctctgccttccgttaacgccttcattttttcagcaaatgcatctgctgattgctgattaacatatacgcctggaacttgcttgtcaccgcggcaaaactcaaataatttatctttcatttctttaagagaggtaccggtaatcgctgctctggcctccatcgcttctctgcccgattgtgtagtgtatgccagatcccgtaaaacgacgctttccgattggccggcttccatcacttcattcgggaacatgtttcttatcgctccggcatattccttcaataagtattcagtaaccgcttgaatggaggggcaatcagttaattcatacatcgtgagttcaatatgaaacatttcgttaataaaatccgccatccggcttaattccaaaggccctacgccaaattcactcaggtgatcagcaatattaatttcttccggatggatatgaagcaattccgaaacaaacggtttgagtacttcattcaccttttctttcatatcaggctgtttatcctttacttcagaacttagtgaacgttggataaaatctctcatgttttcggcatactcaagaagacgttcattgtctttggcagataacaggacaatatgcggttcattctcaacatgttctgttgtgacgtttgtttcttcatattcttctataatgatatgaacattcgttcctcccgctccgaatgagctgatccccgctcttctcggaacagttactgtttttccgttttcctgcagtttcggtttcttccagtcttgcaatgaccgctgtacataaaagggagatgctttaaaatcaatatttggattcaacgtctccgcatgtatggaaggaaacagttttttcagtttcatttgcaaaagaacctttgtcaaaccggcaattcccgctgcggcctcaagatggccgatatttgatttgacagaaccgattgaacaatattgagcgtgctccgtaaattcccgaaacgcttttgttaacccggtgatctcaatcgggtctcccagagaagttcccgttccgtgagcttcaatataactaattgtacgaggatcaatacaagctttctgaagcgcgtcctgtatcagttcagactgaccattcggattaggaaccgtaaaaccgtttgttctccctccgtgattgaccgctgtcgctttaatcagcgcataaatatgatctccgtcccttaccgcttccgccgccggctttaaaagtacggatcccactccttctcccggtacataaccgtcaccgccctcgccgaatgtacggcatcggccatcacttgcaaagaagcggctttgatttaataatgtatatttattcggatgaagcgtaagattgaccccgcccgcaacagcaagtgtgctttctcctcttcgtatactttcacaggctaagtgaatggcgttaagagaggatgaacacattgtatcaaccgccatactcggccccttaaagttaaagaaatatgatattctgtttgctattgcagaaaatggagacccgacggccagttcatttcctttaagtgattcttcaacgccgaaaaattgatagcttccatatgtgacgcctgcaaaaactccgacctttttgcgggtcagatctgaaggtttataacccgcatcctctatggtattgtacactgtctctaaatagagacgttcctgaggatcaagaaaagccgcttctttcggtgatatccggaaaaataaaggatcaaaccgatctggatttttcagaaaacctccccacttatagcagcttccctccagcatttccttccggtcatcaggaatttcgcttacgcaatcctgtccattcatcagcacattttggaactccctgatgttttccgcacccgggtatctgccgctgacaccgataatggctatatcagcagaaaggggatcggccgcaatgtgctcttttgaatcttcttcttcagagcgtaccggcgcttttgtttccactggttttcttttttgctttttttgatctgagacaagttcaggtgtgccggccgggttcagcagtttcatcattcgttcgctgtgatgactcaggaaatattcggctaactgcgatattgaatgatattcaaaaaacaatgttttcgacaatctgccgatactttgctccagctttttggtcagacgcatgatcatcactgaatcaatgccgtatttctccaggtattgtttttcatctatgagtgaggcaggtaatttcaattcttcggacattatatttttcagataactgatgatattttgtcttaattcatcgtttttcaaatcggcatcttcctgctggtctgaatgaaagctgattatgccggcacgcttcagcacatcctcaatcttttcttttcggcctttcagggcaatcagctgttcagatggttgacacaagctgttctccagggcctgtattccgtcaccgtcatctaacgggtcaagaccgagttcctgtttcatgtaggatattccttcatcgtcaatattcatcccgccggaagtccatagcggccaattgactgacactacccttccggcagactcttttgccgtcataactgctgcatactgatccaaacaggcattggcgaaagcatagtcacattggccggctgagccgaagactgccgatgtggatgaaaacaagacaagtaattcaactttcatttttctgatttcttccgccagccacaacgtgccataaactttcgaacctgtgacttgatcaatttcttcttttgtctttcttaagataaaagagtcacggagtacgccggcactgtgaaatactccatgtaaggtgccgaactgctcttttgcaaaagcaaacatccgttcagcatcactttgttttgaaacatcagatcggatatattcaactgttgaacctgaacttcttaaatattcgatctttttctcctgctcttcagttaaatcagagcgccccgtcaatatgagattcgctttccatttttccgacagatgttttgccaatatataaccgagaccgcccaggcctcctgtaatcagataattcccatgatgtttcagcggctgggttaaatcgaatgagccggctttattatagcttttcgtaaaacgtctgccgttttcatagcgcacttcaaaatggatatcccgtttttcgtcacactctctctgatatatatccgctattgctggaagagcggctcccgcaccctctgattgcgtgatattgataatctgatagtgaaaattgggatgttcctggtgaacggttttcaccaatccgccgagagcatgatgcagcggcagttgttctttattctcagtttgaaaaatatgcgtcagctttattatctttttccattttagttcaatcagcgcctgtgtaatatacagaagagaaaacaatccgttttccaattgtttctgtatacctcccttactcatgtcagcctgagaatcagaccacaagtgaagaatcttttcgagcagctgataatgatcatggatgtatcggaacagctttagataatcgtcttttttcacgtggttcatacaaatcgtatcatcatgtaaaacagcaaattcttttccgcggataacaaacaagagagtacagtccttaaacaaaccgctcaattcttgtatttgccgttcattttctgcaaaaatcaggagcaaccccgtcaagggtgcgctcttcttattcggaatgaacgattctgtccattccggcttgtaataaaaaagcggatggttcgatgcccgtgatttttgattctgaatggatgtcacacgggcatagccttcgtcagccgatatctgtcctgattgaatcagatcaagaatatcgctgatttgttcacgttttccgttcatcattcttcccccattaattgtttcaatacagccttctgatcaatatcattggtttccaattgacgcaggagacgaatgagttcgtcgtccgtctgaacagtgccttttttatgaccatatctgaatctcacatctctgcactctgccagaatgcttccgttttcatctgtaaatgtcatacgacacgttacatcacggctgttctgccggttctctttttgagtatagacataaaaattttgagcgagaggctgatagacatccgccgctcccattccgatcaattccgggaaggtttctccgctgacaaaaaacgcactggcatgaattgcggactcaagcgcttcaggagagatcataaaattctctctttttgcataaagctcatccggcaatgaatgaagcgacagcattccgtcactgtttttcgctgattcaatgacaaaaggcgattcagcaggatgttcagtcatttctgatttgacttcagcaatatcaagcgcttcaggaagcataccgctttcaggcttaacaatatgcgcatttcccttggcaagacgtactttattctcactttttgtgtttgcatatatgtcaaatcgcgcaaagccgcgctcaggcgtcagcgtaatcatcagttcccgtatatcagtcattccgttcatgctttcggtccacaataaatcagtcaatgtatgaactggttgtccaaatgcctccgctgcattgacgatagccatttcagccaaagatgcataagggaaaaaggacacgtttccttcagatagacttagtgcaaacggatgattacggctgatttttttcgtgaaactgaactgattaaaatcggacgtgttactccccaagaaagggtgacccggcttactcacatccgctgaaacaagtgcgtcccctttttccgctatccaataccgctgtttgatcagcggttgtcccggaatagaaatcctgcgagcattccgattcacctcaaaagtctcccaatctatctttcttccatttacccatttggatgctgcttcggcgtaatctgaacaaacgtgaggcatttcattgtgaacttctgattcgaatgtattaccggtatggctcaagctgcttttttcacccctgatataagctgagagctcttcagcaatgacctgcccggaatctgccactatcgccagccgttcttccatatgatcgcgtcccgtctgaagtgtataggcaatatcctgaagacgcagtttatgattgttatccttcgattcattttctgatagaaaatcagccataaccttcgcatattttatcagccgttgtttgtcttgagccgataaaacaaagatcactcggccgctttgatgatcaaaagcgtttggcggctcatacgcttccaatataagatgcgcgtttgtccctcctgctccaaaagcgcttaccccggctctcaaaggatgaacagcattgctgttttgcggaatattccattcagccgctttccgctgcacttgaaaaggaacctgctcaaaatctataaacggattaacaatatcggaatgcagagaaggaacaagctgcttattcttcatttggagaagcactttcgttaccgcagcgattcctgccgcagattctaaatgtccgatatttgatttcaccgaaccgatggcgcaaggatgattcagttgataggaatctttcagtccttgaatttcaatcggatcgcctaatgacgtacccgttccatgcgcttcaatataattgacggtattcggatcaatgtcagctttacgaagcgcttctgaaatgacctccgcctgcgcatccggattcggtatggaatacccgctcgtctttcctccgtgattaacggcgcttcccttaatcacaccgtatatttgatcttgatcttctattgcttttttcaatggttttaacaatacggctccgactccctcaccgggaacataaccgcttccgtcttttccaaaactccggcatctgccgtcacttgatagaaactgtcccatgctgaggaacttatatttattcggatgtattgacaaattcactccgccggctaatgccatatcgctctctccgcaatgtatgctttggcatgcataatgaatagaggtcagtgatgaagagcacattgtatccagagccaaactcggaccttttaaatgaaaataataagacacccgattggcaattgaagaatagacggatgccggcgagaaagccactccattttcttctccttcaaatagttgatattggccccacattgcaccgacaaatacaccgactttgatcttttccagcatgtttctcgggtaccctgagtcttcaaaacaatttttggccgtttctaaaaagagcctttcctggggatccataagttctgcttcccttggggaaatatgaaagaaaagcggatcaaattgatcggctccgctgataaaacctccccacttgctgtaagacttccctttcatatctctgtcttcgctgaagaaatcatccatattccagcggtcaggcgggatttctgtaatacaatcttttccgttctttaaattctcccaaaattcaggtaagtcttcagccatcggatacttcccgcttaatccgataatggcaatgtcctcatgccttgtatcagctgtttcatttatttggatctcacggctttcatcctccatgaaggtatcttgaagtgcagatttcaatttttctttgtcaccttcaaacacgatcagctgtgatgcgttcagagagagtgaatcttgaaaagctttgatcccattggttttactaagaggaaccataccgattttttgtttcatccatttttcagtttgtttatccactttcatgccgccgtcttcccatagcggccagccgatggctactgagacgccggagcgttcttttttccgcctcattccttcacgccactcagcgaaaagatcgatgaaccggttggccaatgcgtaatccgtctgtccgatattcccgtacatcgaggtgcttgatgaaaacatcacaaagaagtccaaaggttcggtttgcagcaagctgtccaataagaccgccccatttattttcggagcgatcacttcctggatttcatcttttgatttttgaatcaataaagcgtcgtgcgtcacaccggcactgtgtatcacaccgttgatttctccgaattgccttttaatggtttttatgattcgctctgcatcgcggctatctgaaaaatcacctcttatatattgaaccgaagaaccgcctgctttcattcggctgattttgttctttttgtcttccgtaagttcagaacggcccgctaaaataatattggctttcgtttgggctgcgatatgttctgcaaatataaagcctaagccgccggcccctcctgtaatcatgtatactccgttttctttaaaggagaaacctgagttttgaaccggttccgcttcccgtaaggcacggacccagcgcacatttccttcataataaagatcggtttctcccggatgcgcttcagttgattcgcatctgatgatttcagctgtgagatccggcaacgatgacttgtctgaaactgatatcccgattgtcttaaggaccagtttcgggttctcaagcaaaatagactgccctgcgccatggactgaagcgtaaagcggctgatcatttttatggtccgccggataaaggaaaagcgatacaacctttttttccgccttgctgcgcatcaatgcccggctgaaaaagaatagcgggtaagcccctttagaaagctgttcatttattttttccgggccggcaaatgacccttccggccacccgtaaaccacggtgtcgggcatttgccccctttttttcagatcagctgcaagcctgtcaaagtgagcttcctccctgtgatctatctcataaacaccgtctccgtgataggagaaacgattccctgataaaacgagaatgatctgtgtatttccgaatccattttcagcattttcccgcataaaatgaaaaagctctctgtcatattgaaacagcaggtatgttcttttctttttatttccgcaatgcgggtcccaagcggcagccttttgtctccaatgcggcgttaaataggtcagagccgtatgattctctccatgatgaagagggaggtctttttcaacggaagttttttcgccgctctctgcaaaatagtttgcaagtttttgaatcgtcggatactcaaacaataaagtagggtacagttccctgcctgttttctcttccaatgcctttacggcttgcataagtgttacggaatcgaggccttgttcataaaaaccttttacgacagagagtgtttcaggggcagtccctttgatatctgcgatcagctgctgaatgtctccttctgttataagagcggaaagattttcgttcttactttctttcatgtcaggcttttcagccggttgattttgcgttaagaaataactggacattttttgattttctttaatatacgcggcgagttcccggatcgttttctgctcaaacaggagtgtaggatacagctgttcccctgttttgttttcaagttctttgacaatggcaagcaaagaagctgaatccaggccctgttcataaaaaccaatgtctgtccttatgtcacgcagatctatatttgaaaccccggatattaattctttaagatgtgtctcgatgctttcgcttcgatttatgattgaatcttttctgatcaggctgtcttttggctgagaagccgcttcagtttccaaacgagtctgcttcaggttttcaattaaatcttttgagcgaatatgtttcacagacagccgcgtaaaataagcgatcatctccccgtgtgcatcgtacaaaccgtaacttacttggatgacatcccctgctgaatcatgattttggtcttgcttctctatgtacacataacacctgtcttccaggcgcttcgtcatacggaaagattcaatatgaatgggaatatacgttttcatccggcttgccggagatccttgtgtaaaatattcgggacatgcctgataaaggatcgatatgatggtagacgcgtcaagaaaagtgggatgcaattgaaaatagccggtatattgattggcaatttggctgagcgtcaactctgcaagtacagaatggtcagacgcataaaccttccccagactcttcataaattcaaaatgctctatatcaaccttttttaaatagtcataacatatctccatatcagcttcacgggcggaggcatgtttaatttcatcaatattgattgaactcatgctttccgggattttcggcatgagcctgcagttcatattctcatcccagctttcatccagaatgcggtcatcttttacctttctgctcttcgcctgaatttcccatccctgttccaatccctgaaaacggatgcggatttctctgtcaaaggtatccgatgttgctacaggttccaaatacaaaatattctgacactcgagttcttcaataggcaaacctttgctcagcgccatacggtatatcatatctaaaaatgtgacaccgggtataatccgggtgccatgcacccggtgatccctgacaatatagtccgtatgtttaattgttaatgtgaactgatagttttgattactggccacctgtctcattccttttcttttctttataattctttgaaatcaagtaaaggaatcagcaattctgactcttccttttctggagtttctccattgtcgatccagcattgttccttattgaatataatcggagaaagcgggtgtctttttgtctctccatatcctaatgtgagatggctgtcgctcaatatcatatgtgcgttcgtgcccccgaatccaaaagaactgattccggctctcaaaaccccttttctgggacgccattcttttaaagacgtgttcggaaagaatggcgactgatcaaatttaaaacgcggatttggcgttttacaatgtaatgtcggcgggagcatctgattttttatagataaggcaacctttataatactcgctatccccgctgcactcattaaatgtccgaaattcgtttttacgctgcccactccgcaaaattgcgtttcttccgtaacctcccggaacacttctgtcagcgcttttaattcaatcggatctcctatcatcgtaccggtgccatgcgtctcgacataactgagagtatctgcatcaattccgccttttttcagggctttttttatcactgcgctttgcgctttcggattaggtgttgtcattcccattgtctgtccgtcattattaaccgcggatgagtcaattaccgcgtaaattctgtcaccttcggcaagggcgtcatcaagtcttttcaaaaggactgcgccgcatccctctcccggtacaaatccatctgccttctcatcaaatgtatgacactttccttcaggtgaaagcgcacgcgcctcactcagcatgacgtaaggtttttgatccagcaaaatgtcaactccgcccgcaatcgccatatctgactcttttgacatcaggctttgacaagcgagatggacgctgaccaatgaggaagaacaagccgtgtctacaaccagatttggtcctttcagattaaaaaagtgtgagatatgcgcacctatgaaattttgtcctatacccacgatcgtattttttgaaggagaacctattttggacataaacgtcccggtccgcgaaccgatgaagacgccgacttctttgtttgatacttcttcttttgtatagccgccgtctctcaatgtctggacgctgacctcaaggcattttttgattaacggatcaagctctgatgcctcacttttgttcatattaaaaaacgcgggatcgaaagactcaatatcttgaagaaatccgccccacttactgatactttttcccttttcataggtgtcagagtagtatgaagaaatatcccatcgcgacgccgggacttcgcggacactattttgtcctttcttcaaatttctccagaacgtttctgtgtccggagcatccggaaactcacagcccattccgataatagcgatttggttcagactggtttgttgtatttgagatccgctgtcccgtacttcggaagcattttgatttatatgttgctcttttttccgaatctcaatgttttctgaatcaatttgaggactgatcccctcacttgcaaataattcgtttaaatagacgcccagttgtgaaaaactcggatactccagaaaagctgatggttcaatttttatttgaaatgcatcttccgcttttttgacaagctgaaccagtaagattgaatcaactccgtaatccgcaaaagacgtatcctgatctaaattctcgtaaggtattttcagctccgcggaaaaaatctccattaacgtcctgatcatagcttcattgtctccctgaccagagatctctttttcttcagcatccggcttatttatagcagcttgaattcttgtctgaagcagctgctccagcttgaatttctccggatgtgtctttgccggtataaggcaggggtatccgtttatcgtcatcatttcatccagcatggcaatacctgtttctgttgagtgtgaaagtaaaccaagtgcctgatatgatggacttgtcacctcgcccatcccaatgtccctccagctcggccagttaattgattgataatatgttctgccggctgcatgctgatacgccgcaaagtaatccatgaaagcgttcgctgcggcatagtcacttgttccggcgcctaataaaggaaaggcgctcgcaacagatgaaaacaaaatgaagaaatcaagtttgtcatcaataaaaatgtcatggagtacctgcatcccctgcacctttggctcaaatacttctcttatttcttgatcagatttatgaataaaagccggattcgaatgattggctgcaccagcgcaatgaatcaccccgccgattttgccgaacttcattctcacctttgaaaagaagcgttgtaatttttctttttccgtgagcggcccggaatacacttccacctgaactcccttttgatccaactcatgcagcagttgtaatttcgaataaagaggtgacttttcatcggtgtcttttaacatgccggctattttatcagattccggaaggtcggttactcccatcaacacaagttttttgactcccttgccggcataatgtctggcaagttctgctccgatccctcttgttccccctgtaataaccagggtttgatccttacggcataccggcaggccggatcgtttccggtttatttccgctgcatgtaatttctcgacgtatggaatataacgttcaccgttccggtagcagatttcactatacagcccgtcagcgcaagcttcatctgtgattacctgtctcaattccgccgcagtcccgacatgcccgtctacatctattgtttttgattttatcttttgatactccgcactcagcattttatatagtccggctgtttcggctccggctaacgacggcttgtcattcagaaatgtctgcagccctctggtcacatgtaaaacgaaaagctgtttacgtgtgtttatgatttcctgcagcagtgtcagcttcccgattgtgccggtgtgtgccccgttttgatcactccgcaaatctgacaggtcaatcatgccgatgatttccggattttcttctatgactgctagaaccgtttttttggcttctccatttgaatgatcccagttatctgcgcaaatgacagcgggttcaatcagaggatctgaatcaaacaattcgaatgcaagccgctcactttcactattagccaggatcatcacctgtcctttcgtaaaagcggaaggcgcagccttttgttttttccacgatttttttaatacatcaaatgataagtcaatcggtgtatggggcagactttgcggtacacctgtttttttctgttcctgtgctgcttttgcggcaggcacccaatatctgttccgttcaaaaggatatacaggaagagagataagcttcggtaattccgcagtgtacatctcttcccattcaacgtctcctccgttcacccagtgaatggccatatctcttgcattttcaaagtgagcggctgacagggcacccttttgaccagcgcctcggcgggcctttcccctatataaaccgtttaccttctgatctgaccgcaaatacatcgtcagcttattgcgaagatcgtcaatgctgctaacctcaacagcgagccgctcttccatagcgtttctcccggtctgcgaagtgtacgcagcatcggctagtgacgtgtttggctccagttcttttatatatgcatcaatcaagagtctgagccgttcttcatttttggcagaaagcagaataatttgcgtcttgttgctctgtaccgtttccatcttttcttcattcttatactcttcgatgataatgtgagcattagatcctccagcgccgaaagaactgatgcctgaccttctggcttgattttgcggcgtctcccaatcggtcagttcagactgcacgtaaaacggagtttccccaaaatcaatattaggatttaagttatcggaatgaagggaaggagcaagctgtttatatttcatttgcatcagcacttttgtgatagaagcaattcccgccgcagcctctaggtgtccgatatttgacttaaccgaaccaattgcacaacgataatcgcttttcgagctgtgcaaagctttggttaaacctgaaatttcaatcgggtctcccaaagatgtcccggtgccatgcgcttcaatataacttatgctgtctgcatcaatccccgccttatcaagagtttcactgatgacgtttgcctgctcgcccggatttggcacagtgtatccgtttgtttttccgccgtgatttacagatgttcccttaatcacaccgtaaatcctgtccccgtcagcctttgcggcagaaagcggtttcaaaagaacggccccgactccttctcccggcacatatccgtctcctcccgctccaaagcttctgcagcgcccatcgcttgaaacaaaatggttttgtgaaagtaaagtatatttatccgggtgtaaggataaattcactcctccggctatagcgagggtggattctcccctttttaaactttcacatgcaaaatgaacagcagaaagtgaagaagaacacattgtatcaattgcaaggctgggtccgtgcagatcaaagaaatatgacacccggtttgcgatagacgaataagaagacaggagcgcctgacgttcctcatcatctgaagcaccggctgcaaataactgatagtggctgtaggtgacaccgacaaatacacctgtcttatgccgtttcaactttttctttgtgtaacccgcatcttcaaacgtgtgccacgctgtctctaaaaataaccgttcctgaggatcaattaactcggcatcacggggcgaaattgagaagaacagcggatcgaatttatcagcgtcttttataaaacccccccatttgctgtcatgacgggcattgtcacctgtgtgataatatttccgaaaatcccaacgctctttcggtatttccgttatacaatcttttccggaagaaatattttcccaaaactgttccacatccttcgccatcgggtagcggccggctataccgataattgcaatatcttcctcggaaggtgcggatggtgtgcgggaaacggaaagcttctcccgtttcgccggcgccgaatgatcaattcgctgttcggctgccggtaaaaacgccttcttcaactcatgatgatagtgttcaagaaaatactctgacagctcttcaacactgctgtattcaaagaaaagagtcttagacactcttccaaaatatttttccagacgggagttaagacctaaaatcgttagagaatcaattccgtaacggtcaaacgtatcctcgggtaaaatactgtccgccggtcttcccgtttccgcaccgacgatctctgtcaaaagacgaaccgtttgctttttcagatctttttcatttaattgcggcagattactgttgttttcaggcacagtctctatttctttatgatccgttgagagtaattcacttattctatctttgtctccgctgataacagccagctgagaagcagagcggctcatactgtcctgaaaagcggcaagcccggcttgggcggataaaagttccagccctgcatgtcttaaagcttgcagctctcccggcccgactgtcatattccccgcatcccataacggccaattaatagaaagtgttttcccggaacgtcccttaatgcttcgatactgggtgaatccgtccatacatccgttagcgaaggcgtagtcgctttgacccgcattaggcagaacggccgaaagggacgaaaacataacgaagaaatcaagaggctcttcttcagctgctttatccagccaaacggttccgaataatttaggcgctataacttcttctatgctttctttcgttttttttatgataaatgcatctttaacaagtccggcgctgtgcaaaattccgtttaattctccgaatgtctgcttaatgtgcttaatcaaagcgtccgtctctttttcctttgaaatatctgccgggacatataaggcttcagcgccaagattttcaagagcgctcaatttttgcgccgtttcacgggaggccggggaacggccggttaataccagcttgacttctgcctgtttcgccagatattccgcaaacagatacccgagaccgccggctcctcccgtaattaaatacacaccgttcttttttacactgaaactatgtttctccccatcttctttttttactctttgaagctgccttttataataatgcctcggctcataacaggtaaagtggtccttcttacattgattgttccattcaaaagagatgacatctgcaacatgctgctttgtaaacggctcgtcaaacattgatttcagctctgcagccttacatgtgaaattcggattttcggtctgtacggtcttaagaaaactttcaaccgcgttataaatcggctgaacctcgccctcggtattttcatacaggtacaaaatttctgctttcggacaaagtttgttcgccatgaaggcctgaaacatgtgaaacaaggaaaacagacttttattgagctgctttctcattgcatcttctgtatttttgaagagcccggcagccaaaaaatgaataatatgacggggtcttatattttgagaacgcagaaccccgcataacgcatcataatcctcatctttttcaaagttcattgtaaaacgaccgttccggcaatcttcgaaacgctcgccggaagtcacgtaaatgaaaggtgcctcatagccttcaagctgcctcttcattacggtatacatgctgtcgtcttcgcaaaaaaataaaattggctctttcgtatgcgggaatttttcaatgcctttaaattcatgtctatcccataccatttcatatagatgggttttccccaagctcttaattaattccagcccttcttcaggcgtcaggctgcattctttcacctttttcacgatttgctcaatttgcatcgttttttcattcatggaaaagcaactcctctatcagctctgacgtctctttcgtattcatctcacctgtttgtgctttttcaagaagcgacatgatttctccatctgctgtatctttatttgagttgtgaagctcagtacccgagaaagcctcagccttctgcgcttcatctttatttaaatgaatccaatgtctgttcttgctgaaaggatagagaggaagagacagtttaaccggtttgagttcctcctcatacaagtcttcccagctgatttcacaaccgatcgtccacaactgagccagtttggccggcttgttttgctgaatcagtgattgaacatatgcatgaccttcggggccgccgaataaaggagcgtacagactatcaaaatccgttacatttccttcataaacaccttgcagcctgctcccctgaatgtaaccgtttaatttttcaagaagatctccggtattcgagcaagtgatcgcaaggcggcattcaaatggttcccttccggtttgcagcgtatatgctatttcttcaagactgattccggacttttctctaaaattgccgttatgcggtttatcagctgatcgattccggatgctgctgatatagcggcacagctcgctcagggtcattaattcctgaaatatgtctagtgatatttctgtgccgtacatttggtttatataagagattaattcggaataagccaacggatcaaatccgaattcagaaagaggtgtctttgcatctatatctgcggtatctaaacgcaggatacccgctgccgcttcccgaaccgcctcttgcaaatcacgttcctgcacctcttgctgactgaattgaactgatagttcttcatgtaaaaacgttgttaactctttggctttaaccatcagcctttcctttgttttggccgatagaacaatgatttgttcccgctcggcagttactgctttatcttggccgtattcaaattcttccacgatgacatgagcatttgccccgccgaatccaaaggaactgactccggcacggcgcggaacttcatttccttttcgatcttttaacctggcccacttcatagttttattgacaatacgaaacggtgttccgcttaattgaatgtaagggttcagttccttgacatgtagtgtggcaggcagtgttttatacttcatggatagtaatactttaatcagccccggcattccagaggcgggctctaaatgaccgatattcgtttttactgaaccgatgccgcaatattgatcatgattctttcctgaatgcggctcaaaagatccaaacgcttttttcaagccttcaatctcaatcggatctcccagttctgtcccggttccgtgtgcttcaatataagatatcgtatcaacaggaatatcggcatttttgtaaacagacgttaacagttctgcctgagcttccgggttcggagcggtcaatgaagcagatcttcctccgtgattttctccggttcctctcagaactccgtaaatattgtctctgtcattcattgccgcttgcaatggtttcaataacagaacagctgcaccttcaccgcggacataaccgtcggcaagtttatcaaacgtcttacaccggccgtccctagacaaaataccgagtttatcagtatacatatgcgtgactggatctaagagcagcgaaaccccgcctgctaccgccagctcactttcaccattttgaatcgagcgcacagctctgtggattgctacaagactgcttgagcaggctgtatcaatggactcactcggacctctgaaattaaaataatgggatacacgattgctgatgagcgcctggctgtttccggttcccgcaaacgcatgcgccccgtccgaatgcctcatcagcagctggcggtaatcattaaattgaatgcccgtaaacaccccgatatttttgccagacagctttgaagctttgtaacccgcatcttctatcgctttccaggtttcctgcaaataaattctgtgctgaggatccatgagttctgcttcccgcggattaatattgaaaaacgcctcatcgaatttatcggcatctgtgataaagccgccccatttcgaatgtacttcgctgcttcctttgccttcggcgtattttttccaatcccagcgatccgggggaatttcctgaatcaaatctttttcattgattaaattgatccaaaactcatctgcattttttgctcccggaaaaacacaactcatcccgataatggcaactggctgcttctctggatgatggtcagcctgtcttgttgtctttttttcaaacggaaaacttcgcggcggcttcacggttttcccggtggttttcccagcgtgcactactttccttttttcagaaatgtttttttctgcatctgtattcccttttgcaacagtacgcagttcactgtttagaaattctgaaagagacttaatatggctgtaagtaaagaaaacggcaggtgtcagcttaagcttgtattttttattcagtcggacagctaatgttttcaaactgatagaatcaaagccgagattaccgaaattctctgccgtatccagctgttcaatgttaattttcaataattccgataccatttgcttcagttcttccaggacattgtctgcagacaccggtgctgtataagaaatttcctcttgacgaaccggaagcgtatttactttttgatgcggcagatctttttttgctggtgttgttccggcatccccggtaacaaccgaaatttgcgggcagtcacttgccaaaatcgtctcaaaagccgctatcccttcttccgtttccaaataatcaaacccggatgcagaaagatatgcttcttcagcttctttgtttaaatgcattccgcctttacgccacaacggccagttaatcgaaatgctcttgccttgtctctcttgccggcggctctgttcgaatctccaatttatatattgatcttgaaaataattgcccaacgcataattaacctgtccaaaatctccgaagaccgaagaaatagaagaaaatacgataaagaaatcaagcggctcatctttcgttaattcatctaaacataccgttccttcaattttagcagtcatgccttctgaaaaatcagtcagattcatctctgtaaataaccgatcatcggcatgaccagctgaatgaataacaccttgaatggagccccaagtccgtttcgtttcttctatgacccgtcccatcgtcttttgatctgcggcatcagcttgataatataccgcatctcctccaagtgcctgcagccggtcaatgttatggcgtttatcagctgttaacggtgaccttcccgtcaatactaattttgcttgatactgagaggctaaatattttgcaaaaatcaggcccagaccgcccaaaccgcccgttatgaggtaaacccctttctgtttcagcagatgagagtgctctgtatgattgaacacatactcctttaatgtcttaatatacctcttgttctttatatatttaacttcttccgcctgccgttccatgcctgaaaccatttcgttaaggcaaaactcagccattttttcaattgatatacgttctgaaaagccgattgacttcacattctctgcggatggcaccaacatatttgccgtttttaaacagcctgcaagagcgcccgtatacggatcattcacgccttctttaaaagagtgaacaagaagcaaagaatgaagataaagaaaggcgtcactgcgggcgctcagggcttttaataaataaaaaattgattccaggccgctgagaaggtggtcacccgcgtaaaatgtttctcccgtgtgcaagatgacatcaggagaacatccctttttctccaattcttcaaataaacgaatgtaatctgacgtcacttccgggtttacacagaatgtcagcagattttgatcggtctgccgctgatccggcgtgacgagaatgacacggctgtctgattgatttttcagagcttcagctaatgcttcatcttttgcaaagaccagaattgtttttggctccctatctttgatttcaatcagagggtttttttgatcccacttatgctcataaaaacgtacatttttattaggcttttcgccaaaaaccagcccgctcagttccatcaaaatcccgccggcattgtctaatacatacacatcataagccgaatcgctttctccagtttgttctgcatatacataaacgggttcagtctcatgatcaaaaatcatacattctttaatgttttccgggagctctccggcattttcccccgcaaggtatatgacggcttgatatacgctctcaataacttccggtttgattatgcaccctttcggaccggcctttgcttttatctttaaaagcacctgtccgttcctgctgacgcaatgctctgccgctttcagactgtcactgcagctgtatccgaattcggcaagccgctgataaaacgcttcgtacggtatgcggtctgcatgctgagacaggaacggctcaagatgaatatttccgttctcgtacactccgccttctaattcaagccgccctgatgaataaatggatgagtcgctctgtttttctatagaatacgatgcaccctgattatccggggttaatacaatccggatctgctcattgcttccgctttgtaatatcggttctctaaaggagagctctgttaatttaataatcggattccctgaagccatcgctccggcagctctcgccatttcaatctggctgagaaacggaaacatttccttgtcttgatactttgtttttatatacaaatcggtatcgcttacattgataagaaacttctgtgctttaaaatcagatatattgcatgaaatgtaaggatgcagatcgttatttacgttcatccggcggcttcccgtattttgcgcatctattctgcatagctctttggcaaatggatatccgggtgctgatacccgtctcagagtggcatctttataaagtgacggccaatctactccgttaccgccaacccagtattcagcaatcttcacaagatccctgtttgcggctgcttcttcaatctcagctttgttcatcctttgagcttctgttgtgtctttgccgcttgtaaaaatatgatccatcgcgtttccgagagtataatctgtcagtcctttaagcaattcatcttttgtagaggcgataacagccaatctgtgcggcatttcttctctgccggtttgcaaagtaaatgctgtatttctaagtgtttctaatggataatctctggctgctatatgttcttttgcgcgttttgcatactctgccagcctgtcggcattttttgcagaaaaaacaaataaaagctgttcaggttcttcagcagcgagagaagagatagcttcatccgcaaattcttctaaaataacatgggcattagctcctcctgccccgaaagaactgattccggcacgcctgggaacggatgactcccatttttcggcactgtccggtacataaaaaggtgttttttgaaacggtatattttcattcaattcagcagaatgagtcagtgacggaacaatcgttttatgtttcatttgaagaataactttcgtaatgcccgctatgcctgcagcagcctcaagatgtccgatatttgatttaatcgatccgatcgcgcatgttttcttatcgcgttcggcatctgaaaatgctctggtcagaccggtgatttcaatcggatctcctaacgcggtgcctgttccgtgagcttctatatagctgatgctttttggatcaataaaccctttttttaaggctctcgtaatgacctcactttgagctttgggattcggcacggtatatccattcgtcttagcaccgtggttgatggctgttgccttaataactgaataaatctgatcaccgtccgcaattgccttttttacaggtttcagcagcacggcacctgtcccttctcccggcacatagccgtctcctcctgaaccgaagcttctgcaccggccatcactggataaaaatccgccttgagtcaggagttcatatttatgaggatgaatggataaattgacgcctcctgcaattgcaatttcacattcattcctgattaaactttcacaggcaaaatgaacagccgttaatgatgaggaacacatcgtgtccaaagcaatacttggcccgctgaaattaaaaaagtacgatacccggtttgcgattgatgcatatgaggaagaaacggccgcttcgtgaccaacgctgtacagctgatattggccgtacataacccctgcaaaaacaccgacgttttttctttcaagcgttttctttgcgtaccccgcatcttctatggtgtgccaaaccgtctctaaaaacagtctctcctgcggatcaattaattcagcttcggcaggagaaatattaaagaacaacggatcaaaatgatacacatcgtcaataaatcccccccatttgctttggttttttacttcattgcccgctgcgggctgatagtgcagccccgaatcccaccgatccttaggtatctcagttatacagtctttaccgttcaataagttttcccacagagtatcaagatcatttgccatcgggtaacgtccgctgataccgataatcgcgatatcattatcatgatacttctcctgctgcacctgatttttcatctggattttctgtttcccgttaacatcggctgtctgtttatgatcttttttcttctgagatggggtgctgctcccgttttctcctaaccggagtttatgaagaagagtatccctgtgctcctcaacgaaatactgtgacaattctgccgcagtctgatattcgaataacagcgtttttgagagcgcgccgaaatgtttttcaagctcattcgtcatattgataatcataacggaatcaagtccgtatttttccaatgcctcttctgcatctattttgtccgcaggcatcctgaattctgcagcaatcatttttatgatgaaatcagatgtttcagctgtcagtttctctgaatcaaatgattcgatatttctccctgttccttcatctgcctgaatgctttcttttcgttcatataattgctgaacatgattgtcaatttgctcatctccgtaaaatacagtaaattgcgaaaaaccggaggacaatgcgactgcaaacgcttctttaccttcttctttttctaaaggataaaaacccgcctttttcattgtctctaccgttcgctcatccacttgcatgccgacttctttccacagcggccagttcagagagagagaaatcgtatcagaatgctgggcagaacgcatattcatgaaatgatccatataactgtttccaaacgcgtaatcagattgcccgacatttcccaacactgcggaagtagaggagaagcaaatgaaaaagtcaggattttctttctcaacagcatcattcagccacatcgtacccaatactttcggtctgattacctgatcgaattcctctcgtgacttgttaagaaggaaagagtcacggatgattcccgcgccctgaatgaccccgtttacttttccataagaagttttggcttttttgactagataatcggcttcttccttattggtaatatcagcctgaacataaacagctgaagaacccgcatcctccaatcgtctcagctgttttcttatatgatctgaaagcggagatctccccgttaaaacaaggcagcattttgtttgaaaagccaaatattctgcaaaggtaaatcctaatccgcccgcgcctcctgcgataatatatactccattttctctcagcggcacatctccgcttccggaatttttttcgggttcatacgttttgagctgtttgacataacgctgcatgtctttataacggatctctacatctgaaggctggaaatcactcagctcattgcgtatgatatcagctgcgtgaacggctgctattgactgctccatttcaatgctttttgctgagattaacggattttccagctgcaatgtccgcaaaaatccgcttgccgccgcgtaaagaggctgttctccagaaagatgcgaaaaatatccatataacagcttgatcggtttgcggcagttatttttgaagagcgcctgttgcagtaaaaacaaagaatagactccgctgtcgcattgttcacgaatcgctctctctgtcttttcaaacggcatgtctgaccacaaatgcaccgcttcccgtatatctgacttctcttcttctataagccatcctaacaggtttatgtaatctctttcagagcgggggtcgatttcaaatacaccgtccccggtttttcgaaactccttccccggcttaaccaaaataacccttgtatcatgcaatgcagcaagttctttactcacatcttcacttttatcaaataataaaaggctgccctcacgtcggccgccttttacatgaatgctgagatctgtccgctgccagaccgtctgataatatatcgactgtccgttaacccctgcggaatgagaaccaagctgctgtatccgctttactccttcttccaaagaaatgatgccgctttctatgtcagaaagtactttttttctaatatgacgggcttctttcataaaaaccttcatcccctttacaaatggcactgccgcaaaatgataaactaatcctgcatacgctccagcgcataatctgcttcctccgcagtcagttcgcccgcttttaattgtctgaggagctcttttactctctcgttctttccattggaatccgctgttgcatgattctgtgcctccgcggaaaacgtttcttttttacgaatggttacatcctttaaacctgcaagtctctctccgtgttcattaagcagctgaatatcgtaaataagctcggagtgacctttttggcctgttttacgcgcataagcccagcattctgctgaaacttttttccgaatcgtaatctctcctattgaaaaaggaacataaacagatgcctcttctcttccgtccgtaatgccgaacaaagattgcagagccccatcaattagagacggatgcaatgtataattttcaagagcatatgcggcttcttttggcagcaataagtgtgcaaccgcttccgttccgccgccccataaacgttgaatcggctgaaaagcgcgcccatactggaacccgttttcccgaaaatactcgtaacattcatcttgttcacggacaaaagcacttctgtttatcatctcttgtctgtcgatgttctctatatcatcactgtaatgatgatcataatctaattcccccgtcacaaatccagtccttacagcagcatcctcgtcaggtgacatgttaaataatatgctgccgtcttttacggaaatgtgagtgtaaatggtcaggctctcttgcaaaagcatggccggtctggcaaatatcacgttttttaaacgagtgacctttttctttcgatatgaccgcgttcccgctgcgcatgccatttcaagaaaagcagctgccgggagaatgctcttgttttttacaatgtggtcttttaaccaaatctctttgtctcttaatgtcgttttaaaaaactgctgttccagagtagattcattcgaatccagaagcgggtgcagtgaagactgctgcggcaatatttccggaaatactgcactttggcttccaggcacccagtaagactcctcagcaaatggatataaaggaagcttgaccttctgcggggtatattcttcatataactctctccattgaatatcagccccgaaagaccataattttgcaagaagattcaagtcctttgtctccatcatcgcctcgaggaatttatctttcatcttttgatcatgaaagataaagactttatcaaaatctttcgtaacattgcctttgtatacgccctctccaattgttccttcagtacagaaagttctcagtttctccttaagttccggcaaatcggaagctacaacagcaagtctgtcttccatcggttccctgcatgtctgcaatgtaaaagcgatatcagctgccgaggcctttgtctcccgctctgtgaattgcagaaggcgcagagcgtattctttcagtctgtcttcatttttggcagagagaactgcggcaaacggaccgcttattgtttgtgtgtcagcatggttttgatattcttccacaatgacatgggcatttgctcctcccgctccgaacgaactgattgctgctctcctgttggaggcgcctgattctttccgccactcttcttctttctgctgaacgtaaaaaggcgtcttttcaaatcggatattttggttcagctgttccgagtgaatggatggcgccaatttctggtgcttaaattgtaaaagaacttttgtaagggctgctatacctgcagcagactccaaatgtccgatattagacttcactgaacctatggcacaaaattgtttatcgtccgtaaatttctcaaacgcttttgtcaatcctgcgatctcaatcggatctccgagcgaggtacccgttccgtgtgcttccaagtagctgacggatcgcggactgatgcccgatttcttgaaatttttagcaatcagctcagcttgtgcattcggattcggaaccgtaaatccattggtttttccgccatgatttacagatgttcctttaatcactccgtatatatgatcctgatcagcaattgctttttccagaggtttcaacaggacggctcccgaaccttctcccggcacatagccgtctccgccctctccgaaacttctgcacaatccttcggtggaaacaaaattaccttgactcagccaaaggtatttgctggggtgtatggatacattaacgccgcccgcaagcgcaatttcactttcccctcttttaatgctctcacatgccaagtgaatggccgtcagcgacgatgaacacatcgtatccagtgcaatgcttgggccggagagattaaaaaagtatgaaaccctgttcgcaatagatgaaaagaaggaactgagcgcgatcggattgccccgcgcagtttcttctgcgccgaataattgatattgtccgtacatggctccgacaaacacaccggctttcataccgtcaagcttctcttttgtatatcctgaatcttcaaacgtatgccaggaggtttcgagaaaaattcgctcctgagggtccatcagctcagcttctttatgagaaatgtggaaaaacagcggatcgaattgatcaacaccgctgataaaaccgccccacttactgttgattttccccttctccattctgtcgggactgtaagtcgatctgaaatcccaacgttcctcggggatttcaataatacagtttttccctccggcaatgttttcccagaactcctcaagagtatcggaattcggatatcttccgctcacaccgataatggcaatatcctcacccggctgaaccatgctcggtgcagctgcaactctctgctgccggtgctgttttttactcagattttcttttttcttcggcactcttgttaccggagctgcccctgcggccttaagcactttttctttaaaagatgttaggaagaagtttgaaagctcttcaatgttctgatattcaaaaaagattgtttttggaagatccccgaaagtatcttcaagctttgaaataagtgacatgatcataagtgagttgattccgaatttctcaaaagagtctttcgcatttattttatgagcttggattttcaagacaccgctgatgatcttgattaaatagtcattgactttttctttcgcagcatattcctcttcttcatcgtgttccgccgtaagtgtatcttgatctgctgcagctgtatttctttgaatcgaaagcgcttttatcattttatcccgctctccttctgcaggcattaagctggtaaatgaagaccgcagcattttcagaaacgcttccaaaacagaggaagttcgcatcggcgtcattccgtatttttcttttatttggttgattccattgctgtcgagactcatcccgccatctttcaataacggccaattgattgatagtgtttttccattccgggagagctgagatcgaagcattgcaaaactgtccataaaatgatttgcatacgcatagtcactttggccggcatttccgtaagcggaaaaagaagaaaagagaacaaaaaaatcaagatcttcgtcttttgtcagctcatccagccagattgtcccgtaaactttcggtttcagtacgtccgtaaaatcactgagacttttatttacaagaaatgagtcacgaaggatgccggcagcatgaatgatcccgtttatgctgccgtaccgctgtttaacgccgaaaatgaatcgctctgcctctgttcgatctgttatgtccgtccgctgatattcaacaatagagccgctctcattaagcttactgatccgttctttttgatcagctgttaaaacagaacggcctgtaagtataatcacggcttggttttctttagcgatgtgttccgcaaacagcagcccgagttttccggctcctccggtaatgatatatatgccgcctttttgatacgttacagatccgtgatcgtgttccggaatatcaataggctgcagccctttcacataacaggtatgtgagtctattaaaatctcacattcatcggtttgaaagcgctgtatttcactgatcgcagcatcccatatctcggaaaccggaggatttatgtcagaatactcatggcgaatctgtatggttttcgctttaagcttggagctttccatgtttaccgttttcatgaaacctccgacagcttcatgaaacggctgattcagaccccttgtccaataaatatgcaataacgtaacaggttcgtttctccgcattaaagcttttgataataaaaagagcgagtttatccctctgcaaagagtttcattaacggattcttcagtgtattctctgatttctccgttccataaataaagcacgacatcaggtgtaaatccgttttcagccaaatcagacatcagcatttcgacatgactttcatcagaaggattgattgtgcatctattccgttcaattctataatcagaatcgggcgttacgagaatgacacggttatgatctccattcatcatctcggcatgctgaaaaagacggttatcctgatcaaaaatcagcatatttcccggtgcctgctgattcggcatatcaatgttatttttccttacccaatcgttcttgaaaaaaatggttggggacggagcttgtgattccggctccgcctttttttccatttgttcttttctgtaagtgcgaattagctccagtcctgcatcaggagacatttgctgttcttcaattaaggaaagtatttgtttgatctgcactattttccctccagcagctgataaacttggtcagcagaaagttcaccgtttttcaattgttctaataagaagagaatttcctgatcttcatttttacgtcctgcggttaattctccctcggtcacttttctgacagaaaagtctttcatgctcacggctatttcgccgctctcgttaataaaatcaatgttatacgtataaaaaccggtttctctcaccgaaacatggcatcgggcagtaagcgctctcttaatgtgaagctctctaagtgaataaggaacaaataagccctctttctcattatctcttaacaaaaatgcagccgcttgaaaaccgccgtcaattaatgaaggatggagtgtaaaatgtgaaaacccgttcgctaaatgagccggaagctccaattctgccattaactccatatcactgctgtatacggctttcaacgtttgaaaactgctatgatatgtcaggcccatacgactgaagcggtgataacactcttcccgggttatggcagccttactgctgcgtttgaacttatcaatatcgacatactcaggattgctgtttatgtctccgaatactgtttcactttgtgtgcagatttgctgcacgccatccggaccctctttacatatcgttacgttcaacttatcttgtttcatgtccaagtcggtataaatgtgcagcgtttttcctttatataatataggtctgttccacatcacgtcttttattttatatactttactttctccgcttatttccgcacaaacaagagccatttcaagcgaagcggctcctggcagcacatagtctcctgaaacaaggtgatcagtgacgaaaaattcagttccggaaataacagttttaaatgcttgtttctttaatgttgagacattctcgctgattaatgggtgaagacttttgctattaacctcgcttttgttctttttcggagtaaaccaataactctcttttgcaaacggataagttggcagcggcactctattcaatttcttattgccgattgtcttccattcaaactcggctccattggcccaccattgtgcgagcagctcctcttttccgctttgaagagcctcctcaatcatatattcagaaacagctgtgcgctcttctgtgttttcgcttataaatacgcctttttgcaccttgctgtcatcaagaaagctgacgtatttatctctcagctcagtcagactcgctgcacatacggcaattctttcgttcattgcttcccggccgttttgcaatgtaaattccatgtcactggcattaacggtcatttcaccggcaatcacgcgatccaagtactgaagcataagccggatatactcaagtaattgatctttggttttcgcagataaaacaaaaatatgtgtgttaccgttgttttccggcacttctttttgaggttccctatattcctctaaaacaatatgcgcgttcacaccgccgaatccgaatgagctgacacctgctctcctcggcagatcgttgttctcttcatcttttatcggattccacttttgagcggtttctgtgatataaaatggtgtattttccagtttgatgtatggattgagttctgaaaaatgggcgagtcccggaagtttgcgatatttaaaagccagtaacactttcatcactccggctattccggcagcggtttcgagatggccgatgtttgttttcacagacccgattccgcagcatttctgtttcgcaaaaggaatgtcccattcttgatataacgttttaaatgcctttatgatgctgtttacttcaatcggatcgccaaggcttgtccctgtgccatgcgcttctatatatcccgcagtggcagggctgacccccgccttccgccaagcttcggttaataagtccgcctgtgcgttcggattcggagctgtcaaagaattggcgcggccgccgtgatttacagctgaccctttaatcaaaccatatatatgatcaccgtctgcctgtgctttgctgagcggcttaagcaatactgcagccgccccttcactccttacatagccgtcagcgcttttatcaaacgttttgcactttccgtctttggaaagcatacctgctttatcaaaagctataaacagagtagggcttgtcataatatgcacaccgcctgcaatcgccatttcaaaatcgcctctttgaatcccctcagccgcacgatgaagcgcaactaacgaacttgaacaggcagtgtcaatcggttcgctcggacccgtcagattcagctgataagaaatacgatttgccaatatacaatgatttaaaccggttgcagtctgcgcctgaacagagacgccattttcattcagacgttcagcataatccgttgtggcgacccctgcaaacaccgcggttttcgtccctgccaaatcagatggcttatagcccgcatcttctattgttttccatacagtctccataaaaattctttgctggggatccattaattctgcttcggcgggagaaatcccgaaaaacaacggatcaaaactgtccgcgcctttgataaatccgcctttttttatttttgttctattgacgtccctgatcggatcgccgtcaaactctttccagtcccaacggtcttcaggaatgtctgtaatcatatcccgccctttttcaattccttcccaaaagtcttccagcgaatctgtttgggggaaacggccgcttattcccactattgcaaccggctcattcatatgtctttcctcttgccaagttttgttttcaggctcaggggaatgttcataggattccggcggaggcgtgctgtacaatgttttttcgtcagctgcagaaaaagattctgtctcagcaaaaaggatttctccgtattgctcgattacataatcagtcagttcagccagtgaattgcattcaaagaaaatggacggtaacaattccgtaccatattgttgattgatttcatttccgagtctggtaaacgtaatagaatcaaatccgtactcgccgaatgaagtctcttcttctatttcctttctgtcaatctttaaaatacttgacatcatctttgcgatgccctcaatcagattttctctcctgtctttcgccgcagattcatctgaagaaaaagaaccgcagagatgaagctcttcggaatactcactctttaaaaactcaagaagttcattaaaatcagtaagaccgaaaaaatctgacggcatcattgatattcctaatgtttcgtttaattcgttgcccagcattgtaaacataattgaatcaaatccgtattcacttatcggcagttcaaaatcaaattcccgttcttcaatttttaatacgccggtgatgatgcgcgtcaaagtgctttttaaagattcagttattgacagctctttcggttcgtgattttcgtcggcgattgccgggtcactttttccgctgtcaatcgttatcattcgttccagctttaattcattaccgctaaataccattatttgatgttcacaccctgtcattgcttgatcaaatgctgcaaggccttcccgtttttccagaggcagcattccgaaacggtcataaaggaacttctctgaatgaatatcaatttgcataccgccttccttccataaaggccaattaatcgagactgtttgtccaggtttattttccgccgctctcatttccgcaaaataatccataaaccggtttgcataagcataatcggtttgtcccgcgttccctattattgcgctgatagatgaaaacataacaaaaaagtccagaggttctctgtctgtataccggtcaagccatatcgttccgtaaaccttgctggccaagactgaatcgagatcctcttcacgcttattgatgagtaatgaatcttttatcacaccggcgctgtgaataattcctttaacaggacctaatttgtttttgacgagttttatcaggttgtcgacattttccttatcagaaatatcggttcttatataaaaaacttctgatccgtttttttcgagctcttttacattgcttacggcttcctcagaaagctctgacctgccgataaggacaagttttattctcccttttcgcacaagatgtctggcgaaaatcagtcccagaccgcctgttcctcctgtaatgaggtaaactcccccttcttttacctccatctttttggggggctctgcactttcaatttctgcagagtgtttcacctgcctgattccatctctgtatctgatttctgaagtatcatcgctgatgattgtttctttcacaaggttttttaattcaggcagaccggtattcagctgcaactgaatttcgtcgctgtgtatttcaatatttttaccggacaacattggatgttctaaatgaagcgacctaaaaaagccgctgattgccatttgataaggtaagatttgattttcccttgtgaaaaatacatgtgatatcaggattttatgtcttgggattgttgctagcagagctttcgttacattgaaaaccggcaaaacagcctcttccagcttttcacgaatgttatgctcaattcccgtttcagggctcatcccgattaaaatgacgcggtcaattgtcacttgtctttctttaagaatcgccaacaatttctgatagccgtcaagtttgacgctgttcaattcaaaggaatcagcttctttttcttgaaaactgccgccatggcggacaaagatcatgttcaagccgatatctttatatgcctggcggatcagcggttctgatatatcccgacggagtgaaatcacaaggcagctgtttaaaccgccggcttcaggctgatgaagcagaggggcccgcttccacatatcagtgtaatatttaactgaatgccgctcatcttgagtctgcggtgcagcctttaatgccttcaacgctaagttttttattttaagacttacagatccgttttcatccataaatagtatatgaaaccttttgacatcatcatgttgtctttcatcggcagctgtaatgtaagcatagccgtttgccgaaggtgcgtgaagaatctccagctcacctaattcaaaaggcaaatatgcggtgtgatccccttcttgaccggacataaacccggttgtggattgaaaaatgccatccaataaacacggttccagcagcgtgccggattttttatgaatgctctcaggaagtgatattcgtgcaagaacagcattttcatggataaacagctgttttattacctgaaaactggctccatagtccaaaccgctctgccggaaggtcctataacactcagcgccgctgattaatcttttctgtccggttaaccagctgtccaattgaaaatgctctgtatgagaggcatctttatctccgcatgtgataatgtttccttggcaatgaactgccgcttcaggttgcagatcggttttcaccacaaatttgctgtctttttgattcggcagcagatctatcattatcgtcttttctttttcaacgattattggaaccggccatacaacctgactcagttttatgactgattttccgtacagcctctctcccgcttctctggccgcttcgatgattgccgctccgggcagaaccatattcccatgcacaacatgatcttttaaataatattcagaatcagaaagcgttttataaaatcggcactcacctgcagaaaaatcaaataaaggagctgtaccggctgctgattttgtttgcgccttatttgacacccacagtctgttttttaagaaagggtaagtcggcagcgcaattttcgccggttttctgccggtgcggaaatcttcccagcttaaattccctcctgatacccagaattcagccatttcggctaatgtggttctgccgaatttgagcggagaatccgattgctgctgtctgcgtttatgattcggttttttccctctaaatatttcgtgatcgtcaattccattataaaagtgatttaatttcaacatcagatcatcgatattatttgaaatgacagcaagcctttccggcatggcttcgcgcccttcaagaagggtatacgcaatatcagaaaggtgaagcggcttgtttgttcccgcttgctgcaaaaactcgtcctgcttatgacgggccttttgaagatattcctccagctgttttgccgattcccgtaaactcagtgaatgcttggctgagagtacgataagttcctcactttcctcacaatccgtatgacagtcagcagcagactcatactcttccacaagaatatgagcatttgccccgcccgctccgaaagaacttaatcccgcgcgccgcggatatttgctgtcagaatgtttttcattcgcgggttttatccagtcggcggtttcctgctgaagacaaaaaggtgtctcttccagataaagatccggatgcacccgttcagcatgcagtgttgcggctatttttttatacttcatttgtaagataatctttgtcaggccggcaatacccgcagccgcttcgagatgaccgatgttagatttaatcgatccgagagagcaatatgaaacatcttcggtataagctctaaacgccttggtcaggcctcggacttcaatcgggtcacccagcggcgtccccgtgccgtgggcttcaataaagctgacacttctggcgctccaaccggccgctttaagagctccttgaattaaatccgcctgtgcggcaggattaggcaccgtatagccattcgtctttccgccgtgattaatagccgttcctttaatgacggcgtacacagtatcattatcacgtatggcatctttaagcggtttaagaattacggccccgacaccttccccgggtacgaaaccgtcgccgccttctccaaaacttctgcattttcccgattttgaaagcatccccatctgacatcggtataaatagtcagaaggatgaagatacaaatttactcctcccgcaaccgcaaccgagcactcacctttttttaaactttggcaagccatgtgaattgccgttaaggatgaagagcaagccgtatctacagggacactgggacctgtaaagtcaaatgtgtaagacactctgttcgcgagagaccatgggaacgaatttggaagtacatcgtttttgtccgtcggtattctttcgccgagcagcttgtaagaattggttgtaactcccgcaaatacaccgacatgtttttcagtctgctttctcaacccttcaatggtatatcccgaatcttcaaatgctttccatacggtttcgagaaatattcgttcctgaggatccatcgcttctgcttctctcggcgatatttggaaaaacaaagaatcaaatgattcagcattctttaaaaatccgccccatttgcaataaattttcccctcatgcgctttagcgggatctggatcatagtaggtctcataattccatcgttctttcggaatttctgtgattgcggttctctcttttgatagaagatcccacaattcttcgatattttcagccccgggataacggccgctgataccgattaccgctatcccgtcaagatgttctttttcctccgccgcagatgcagtggtgttttgttccggcctggcgggggtaatgctctgaatctgttttcctttttcctcccgtgaaaataaacgtcccagccgatccgggtattcctttacaagatgatctgctaaatctctgattgtatgaaattcaaataaaagcgttttcgaaattgctcccagtgactgctccagctttgtgttgcattgatgaatcataacggaatccattccatattcagccagatgcacatcttgatcgatctcttcccgttctgcaccgacctcacaggagatgatattggttaaaaacaaaactgtctgatccaaaatatcgccttgagccaaaggaacggcactgcctgtctctgtttcgtccgtcaaaaatctctgctgcataaattgttcaaagcgttcatgatcaccgcagactgcaatattatgcagctgacccgaagttacaatccgcgaaaaccattgcgttccgtcttcagcaggaagttcttcgagccctgaaccatgaaaaagagacgtccgcccttgacctgacaggttcgcccccattccgatgtcttgccataaaggccaattgattgtcagcgtgcggccgctgcgcagagaattttgccgtttctgttcccgatattcggcaaaatgatctaaaaagccgtttgcatatgcataatcaccctggccttcattccctgcaatagagacgactgaagaaaaaacggcgaaaaaatccaattccagcgacttcgttgcatgatcaagattcaatgcgccatgaacttttggagcaatcacctctgaaagttcctgctttgtttttcgaaaaagcagcgagtctctgataactcctgcacaatgaatgacgccatgaagacctgcatgctgatcggtaataccgtcaatcattttttttaccgcttctttatcggatatattcgcctgtatataataaacctttgctttaaagctgttcaggtattctaaatgtttctgcttatctccgtttaaagcagatcgccccgatagaataatggtggatctttcagttttcgcgcaatattcagcgactttactgccaatcccccccaatccccctgtaattaaatatactttatctttttcagggtattgaatggtctttgtgtatgtttctctctgcttctctaacatccgtgcatatcttacgcagcctctgtaagtgatatgaatatgccgatcaggcgctgtgtttatttctttataaagaatagcagccttctctgaaaatgaaacggatgcagaatcatgttcaaagcaaaccgtcttacaatgcagctgcggatattcttgttttaccgattttaaaaaaccgttcacaccttcaaaatacggcaatttttctttttgatctgcgctgaatgtataaatgaacgttactttgtttataaggttctcgctgattaaagccttagtcagataaaacacggaataaattcctgattcgagtgtttcttccagttcaggctgtttttcagaccacgtatgcaaaattgcatcaggcgctgcgcctttttcttttaacagacgaatgacactttgataatcatcgggacgctgcctgttgatcgtgaaaacactgtcgcttatctgctctaaacggtcaccgggcataataagatatgcggacgtattctctctttttttcagctcttcaaaatagtctttgttaccggagaacaacaaaatagtacaggcttgtccgctgtccgcttcattctcaagtgcggtttctttccataccggcgtataaagtgcctgattcttcttttctgaaaaagccgcgtctgattttacctgctgagggtttaaagaaaattgagagcgctcaaacggataaggcggaagcggggcttttcttttatgatagtcacctagtttcgcccattcaatctcttctcctgaaagccacatttgcataaatgaatgataaagagcctcatcagctggtttgtccgcttcaaaagcagccgctttgtttagttttgctgatggagggagcgatccgaattgaaaaactgaaaaatcagaaacatccacatccggctccgttcccttttcttccgtgtgaagcggcatatgatcagctatctcctgagacacggcatccatttgattgtattctgtcatcaacggaaaacgagttttatcataaaaacctgccggctgctcattaatacaagcaacagcctgtttaattccgtcttgctttttcaataacatgcttagaaaaagttctttagacaagattccttcatcaagtaaatttaatatttccagaacataatcattattaaagaatccatcatgatctgttaaatcccatctcttatacagtcttctcatagaggcaaggatagccatgaccgctgcttcctcatcagccggcaatgcatttcttttaaccgccgtgcgattcacaatataagataaaatctcgatttcctgagtcttccccgctttatcccactcttctaaaaaccctttaaacgtatattggtgctcaagaagcagccgtgttttcccgtacaggcggtctgtaaaatcagccgggaagctcagaccgttcagcagcatccttacataatcttcatttaatcgaaccggcgggtacgtttttgaagtgtacggattgacaaatggaatggacggcggcttacaggatatgtgcgaaggtttttcagcgcctgtgattacagaaatggccttttcaattttgatgatatccgctgctgcaagagcgacgtaatatccgtctccggcgcctgtaatgaggcttggcttaaaaccggatgccaggatactttttatgatttccgtattgataactaaagaatacaagcggattttctcaggtgtccattttcttttaaatgaactgtgcaatgttggtatacccttcagaaccggccttacgttcttttctaaatcagggaacacccgtttcaaaacggcaaattgtttataactttcccatttgaagtcaccgatggcaagcgcccattcagaatcttgtttcctccgaaaacttaatccctctttaagctgatttttaaattcctccttgctgcctgccaataaaccagccctgtaatcaaacgatgtcctccccgttaaaagggtgctgctgatcacttcatttgatattttgcaaaattcctcagaatcgtcagcaaaggttctccaatgatgtatcatttgtttcatgctttcttcacttttagcggaaaaaaggaagggtacccttcct

SEQ ID NO: 72 - DNA, 24013 bp, Bacillus amyloliquefaciens
catactggcgggaagcggtgtctgagccgccctgcttcatcatcttccatccgaaatacaccatggcgccggccagtccgatcgcaacgataaatggaagagaaccgacgagaatcatagctccgatgacgcccgcgatgatacccgataccgcccggccttttgaaaaacgtttgattccccagtaaagcatcaggcctccgatcaccagcgggatgataaatgcgaaatggcctcctccgaaaaagacagaaagtccgaacacaatcagcagaaagccgcctgccgttttaccatttatattcatgcagatcctcctttcgttttccttgtctttactataaacaaatcccgcggccggcaaaacgagtcagagattgattttcatatcagaccggagtcgtataagcccccggaccttcgcataaaaaaacgccgctgcaccggacggcgcagggcgttttacgaaaaatctatattctgatgctcgcttctttttctctgatgagatctgagcgttcggctttggccagcttcgtaaagaacaatattccgagaccggacaggacttcaacgagaccgccggcggcaatgacttttccggaaccgaaggcgttagccgcgtatccgcaaagaaccgcgccgagcggaatggatatgtttgagatcatatggatgacggcatagacttgcggctggtcatcatggtccacagacgtctgaataatcgtatattccggcacattaatcgcgctgacggcagatccgaacgcaaacgcggcgaggaagacgagcggcagaaaagtgttgaggccggtgatgaaaaatgccgccccttctatgattcctgctgacacaaacaggagaccgtatttgttcaccttcaccttagccaaaataaaacccattaaaaaggctccgcccgtgcctgtcgctttcaaaagcgagtagatgatcggcggcatgtttaaatcttcggcgacataaacggcagagagcgcctcccacggagcggccgcaaaattcatgaagatacaatagatggcgagcgggtataaaatctggtgtttcctgacaagaacgaaaccccgtttgagccttccgaaatacgtcccgcgctgtctgacggcgactgtatcctgtttggcatgccggacttggtatgacataaagagtacgagaaaacctgatagaagatagaatataagagcgataaacaaagaataagcgggactgataaatgttaagaataccccgctcagcgtaatggcggcaagcctgacgatctggcctgatgactggatgaccgcattcgctttctgcaggctgttttctccgacaatattggggattaatgagatagatgcgggattataagcggctcccgtggctgaatgcacaatcatgagaagcatgacaaaccataaaggagaaaaaccgttaaaataacagatcggaatgatcaacacgaccgccgcgcgcgtgaggtcggagaaatacatccagaatttcagcgtatgctgcttcataaaaggcccggtaatcggcgccagcatcgcctccggaaggaacgtgaccgcaattaacagggacgtgccgatcgcgccttccccgtcaaaaatcaaaaaccacagaatggaattaaaggcaaaaccgtcgcctgacaatttaactagccttgagataaacagaagggtgaaatttttattccagatgctctcgctcttattatatgtatccatctatcaaatcccccattattttacaatgtttcttataatatctcattttttaatttttcagtcaataatgcataagatacattttccttctgtcaataaaggttcaattgatggatatctctataaaaaaacagccggcttgcagctgccggctgaacaaaacgttattcatcatcacggaataccgcggcgcttctttcatattctatgtcctgaacgccctgtcttgcgttaaccgctcttgccgccgcgaaaaaataatcagacaggcggttcaagtaacgcatcaccgtatcgtttatctcttctgttttacccagtttcacgacgagacgctcagcccgtctcgtgacagtccgcgcgatgtgaagctgagcagccgccttatgcccgcccggaagaataaatttctcaagcgagggcgcttcagccgtgtaacggtctatgcagtcttccaatgcggaaatcgatgtctctcttaatgtatagcttctatgttcagtgaccgtcgccaagtcgccgccgcagtcaaacagctcatgctgaatgtttcgaagttcggctttcacatcaccgcaattctcacaatcatcaagctccgcaagcgcaagcccgataaagctgttcagctcatcgatcgtcccgtagctttcaacccgcagactgtctttatccgttctgccgcccatcaggcttgtctgtcctttatcgccggtttttgtatacagcttcatcgttgtattcctccttcttccgccgcttttacacatgcagcggttcctcttctgacggctctttccgcgtgagggacgtccatcgcctctcctgtctgcaaggcacaaatgacaatgtcgccttttgcctgtctgccggaaagggcctgcattctcgcttcagccgctgccgttaacagccgaacaaatccctgttccgataaatgtccgctgatcagcacccaaacggtatactgcgcagtcacggctatcgtaaccgaatcaaacgtacggcagatcaaaccagctgccgccgagccggaaagccggcggctccacgaaaagcccgggccgtcagatgcggttgacagcattctgaacggccgttctgtatgaagcgttacggtatttccgcttttgtttatcagagaggcgaacggaacgccggcgggctctccttcctcccgcgcttccggcataaaagagatcagcggtttcggcgacgattgctgggcaacagcgctgacggtgatgccgtaaatgtcttcaatcgtctctttttttaaagcctgatccggcgtctgcttcggaatagcgcgtccgtctttcatcatcaggagctgatcacaatattggcttgctgcgttgaggtcgtgaaaaatactgatgaccgtcaggcctctttctctcgtcagccgctttaccgtatcaagcaggtctttctgatatttgagatcaagaaaggtcgtcggctcatccagacagagcacctcaggctgctgagccagtgcctgcgccagatagacgcgctgccgctcccctccgctcagattgcggaccgattgctgcgcatatcggtcgatgcccgtcatttccatcgcttcccggacaatgtcttcgtcatgttgatccatctgtctgaagagtcctttttgatacgggtatctgccgaaggacaccgtttccttaacggtaaatgtaaaagcttgctccgtatgctgcggcaaaacggccatgattttcgcaagctcccgcggcttgtatccgccgacgggcctgcctgctgcgagcacctcgccttttgacggagagagcattcccgtcagcaatttcatcagcgttgtttttcccgagccgttcggaccgagtatgccgacaaattcaccttttccggcggtaaagctgacatcttccacaatcatccggcctccgtacccgccggacaggctgctcaccctgatcataagcgtttccctccatgatgctggcgaagcagaatcaaggcaaacacaggcgctcccgccaaagccgtcataatgccgatcggcaattcgacaggctcaatgacggtgcgggaaatcaaatccgccaaaatgagaaacccggcgcccgtcaatgctgacagcggcagtaaatggcgatgatccgttccccataaaagccgtgtcacgtggggaatgacaaggccgacaaatccgatcgtccccgagacggcaaccgctcctcccgtcagcagagatccggcggcgatcatcagcagttttctttttcccgtactgacgcctaacagccttgccttttcttctccataagtcataatgtttaattctttgccattgataagcagaagcgccgtcccggccagaaaaaaaggcagaaacagcgcgacatagccccagcccctcattgacacgcttcctaacagccagtggacaatcgggagcagatcatttcccgttaaagcgatcacaagcgaaatgagagccccgagaaaagaattcatgatgatgcctgtcaaaatgagcgtcgaaaccgacatcgacgcatgaacgaggcggctgaaaaacagaaccgccgccatgaccgcaatcgctgcggcgatgctgacaaccggtagtgtgaaccggccgatgacgggaatctgaatgccgaaaaacaaggtgataacggctcccgccgaggctcccgaagataccccgagtgtataagggtcggcgagcggatttttcagaagtccctgaaacgccgccccggcaatggataacgcagctccgacaagagcggccagaacgactctcggcaaacggatattcatcataatatttacattcatgggatcaacagaggatgtccggccgatcccgatccaaaaaacgtcggataaaggaatatgcagactgccgattgaaatgccgagtgccgtacaaacggctaaaaacagcaggctgaccgtgtaggccagcgggcggttactttttaaacgtttcaggataaacgctttctgcaagcttctcgacccctttgacaaggcgcgggcctgagcgtgtgacaaggtcgggatcaacagaatagacattgtggtgtttgaccgcattgacggcaccccagccggcgcgtttttccacttcagcggcctttacgccgtctgtcgtaatgatgacgtcgggattcattttgacaatcgcttcatccgtcaattgcacccagccggtctggctgccggcagcgtttttcgcgtgtatatctttaagcatttcgttcataaacgtgcctttccccgtcgtgtagccgtcaggagacacttcgacgaatactttcttttcgtctttttcagaaatggccgccgctttcttttctatgccggaaaggtcggatttcatcgatttgatcagcttatccgcctgcttttctttgccggccgcttttccgatcatgctgatagatttgtatacgtcttggaacgattgcgcatcattgaccgttaagacggtgatgcccgcatctttcagttgcttcatcgcatcggcggaagcggacatagaggacgcgtgggcaagcacgagatccggcttcagcgcgatgactttttcagcgttcacattcatatctccgactttcggtttttttaccgcttctttcggatatgtatcatttgtcgtaacgcctgcgaccttatctcccagtccgagcgcgtatgtaatttccgtattgctcggcatgagggaaacgattttttccggtgcctgctttatggttactttttcgttcacggcatccttaatggttaccgggaatgcttcggttgagacggctttttgtttggccgcgcttccttcttcctgtgcgccggaacagccggcgatcacaaaggcggtgaccaagagcgccgcccagacggcagtgatcttcttcattcttttaactccccctgattatggtaaacgattgtctctttgacattcgtatccttttttcgcagtaattatactataagtctttaaggcttgtatatccggcctttttgcatgaaagcaaattgttcgtacacactaaaattcatcatgtatactgttacacattggcgtaaaaaggaggattatcatggaattacagcttgaacgaaagctcgtgttgattacaggatcgacttcaggcatcggaaaagccgcggcaaaaagctttttagccgaaggcgccgaggtgattgtaaacggaagaaaaaaagaaactgtggaacggacggttgaggagctttccgcttacggaacggttcacggcatcgctgcggatttatcgcgtcaggatgaggcggatgacttgatcaagcgcgccggcggaatcggggaagtcgatattctcgtcaataacctcggcttttttgaagtaaaggacttcgctgaggtgtctgatgacgaatggactcggtattttgaagtgaatgttatgagcgccgtgcgcctgtgccggcgttttctgccgcaaatgctcgaaagaaacagcggacggattctgaacatctccagtgaagccggagtcaaaccgcttgcgcaaatgattccttattcaatgacgaaaacggcgttaatcagcttgtcccggggaatggctgaaatgacgaaaggcacaaatgtcacggtcaactccgtgctgccgggaccgacatggaccgaaggcgtcgcttcttacatggaaggagccgcaaaggctgccggagaagacacggacagcttcgtccgggattattttaaagtgaatgagccgacatctttgattcagcgctatgcaaccccggaagaagtcgccaatacgattgtatttctcgcttcatcagcggcttctgccattaatggcaccgcacagcgggttgaaggcggcatcatccgctccatttaacacaaaaaagcccagcacaatgggaacttccccatatgccagggcttttttttacatcatgcctgcaaacggaaccggctcccagccgcccgtctcaagctctgctgaaaacaggccgcccgcatgcggctgctcaagtctttcggcttccgtcaatttttccgtcgcggtcgtaatgtataacgtgttcaagtctctgcccccgaacgcacagcaggtgacgtatttcgccggaacttcgatagatgcaatttccttatgcaaaaacgggtcaatccggacggcacggccgcctccgaacagagccacccacagcattccgtcacggtcaatggtcattccgtcgggagatccttgcgactccggaaagcggtagaccgttttcggatctgatacggctccggtttcaggatcatatgaataacagacgatttcctgcgtcggagtatcgatatagtacatcaggtttcggtcccgatcccaatccaaaccgttcgaggtggagacctggtcttttattttggcaaggctgccgtccgtattcagacggtacagcgaagcctcctcttctttgccttccatgctcgtcgttcccgcccataatctgccggacgggtcgcattttgcgtcattgaaacggatatcttcccgcatgtctctcggctgcttcatcttcgtcaatgtatcttcccgaagattgtacaggtaaaacccatctttcatcgtcatcaccagctcttcctttgaatacaaggccagagccgtgacaaatgatttgaatttaacggaacggttgattccgtcagccggagtgaagatatggagctggctgcccagtatatccacccagtacaggcattccttatccttgtcccataaagggccttctccgataactgctctcgtatctgctcgtaatgctgcttccatatgtgaacacctcttttgcttgtcagtcttctattgttattcccgacaaagcggcgtccaaacttaatcttttttaaaaagaatcgtgatcaccgttccggcgctgattctgctgttgacatggatggttccgttatgaaggtgtaccagctccttggcaatggcgagtccgagtcccgttccttctgacgggcctttcgtattcgttccccggtaataacggttaaacagctggtgaatcgtttcgtcgtccattcctcttccgttatctttcactttcagaatgagctgttcggctgattcctcaagcacgacccgaatggcggtccctttcttattatgcttaaccgcgtttgccagcagattctccagaacacggcggaaccacgcttcatcaatggcgaaaagaatgtcttcctttttggtttcaaaggcgatgtcatagccttccgagaacgtgtttttcgtgaaatcgttcgtgacgtttctgataaacggcacgacgttgatcagccgccgttcgatcgggagggccgcgtttttgaggcggtatgttaagtttaagtcctcaatcagcttggacatatattctgatttttcccggacgatctgccccatctctttgacttcttcgggggtccaatcgtattgcttcgattcaagcatcatgctgtagccgtaaatcgtgctcagcggggtttttaagtcatggctcagcccggcgatccattcttcccttgtcgcctggattttttctctgtttttcttatcccgcttcagcgtgtcggtcagctgatccatcgattcgaaaatctcggcgaaaaagcggaacggctgttttgttttgccttttttgtttttgctgaccggctgtcctttgcggttcttcggctcttcaagccggccctttgataaattgacgagccatttgatggtatgaaacagcggccagccgaaacggaaagagtaccagatggtcaggatgcagatcataaatactaagattccgatcaagagaaagagggttttcatcacatttctcaaaaatgatttgttaaactcgtgatcggggatgtacacggggttcggcaccgatgcaaccatccatttcgttttatcgagtcttttaaaagaaatttcccgtttgtaattccacggcttggaactgtatttcagtaattcaagctcattgacggtgttccgttcttttttcgtgctgttgatatccccgagcagtctgccgctgtcttcgagaaggtagaccgcccctttttcccgtttaatataatcaaccgtgctttttttatattgagaaagggaagcgagggatggctcctgtgattcgatgtaagtgagaagctgctcactggcggatttccagccgaacagaatcaaataggtctcatcatttatcgtgaccgtccagtaattcagcttgtagttgtcaaaattccggtactgataaatggataagaggtcttttctgctgtaatggctcgggacgtctttcggcactctgtaggcgtagtccgttttttcattgtcattaatgatctgcagccagcccttctgctttctgaccgacatctttaaaaattcatcgacatcccatgtgccgtcttcatttttatcaagccacgcttcaaacgagtctgccgtcgctttggtcagtcccgcattggcttccgcttcgctgaaacgccaatccaaatagaagaaagaagcgacggccaaaacggacatcagcaggatgacaagcagcagctgaccgaaaaagtggagcagaaattttccgcgcattctcatgaccgggttcctttttctccttgatcgggaataaaccgatagccgaggccgcgcaccgttacaatataagacggattgctggggtctttttcaatcttttctctgagtttgcggatatgcaccatgacggtgttgttgtcgccgtaagacggatatccccatactttttcatagatctgatcttttgagagcaccacatcagggtgttcacagaaatattgaagcaattgcagaagctgtgcggagcagctgacgggctcgcccccgacgatcagctcggcgttttgcggcgaataggaaaaatggctgtatgaatacgtctttaacgccgttttctcttcgcgcttataggttctctttaacgtcgccctgatccgcgccgccaattcgagcggattaaacggctttgttatataatcgtcagctcccaatgcaaatcctgacagcttatccgcatcagaagaacgggcagtcagaaaaaagatcggagcgtcggtatagttccggatttcggtgcatgcttcaaaaccggacatgccttccatcatcacatccagcacgagcagatccgcggtttcatgtttaacaaactcgatcgcttcctcagcgcttccggctgtcttaatgttgtgatagccttctttgacgagaacgcgtttgaccatatcaacgatcgccttctcatcgtctacaattaaaattgacgcattttccaccttggacgttcctttctctttgtttttttcatcatatcattatatggataagatttggtacctttttagtgcggaggtcttgcggggaaacagaaaagaaaaacgagacgtacatctcttctcgtttttctcacgttgtcagagcggaatatcaatcatcccgccgcttttgtcaggagctttcatttataagatgaagaataaattcccaaaaacccggtacttcctggcataacagcatgtccgctttttcaactattttaatcttcaattcttgttcaagatcttctctttcctggtatgatgtattgctcagttttttttttatcattggcgaaaaacgcgaaatcaaaagttccatttcgtcggtatctgtgttctctttgttgaagtcaaatggcccgttcactgcttattttccccctttttttgcttgtccagctgctttctgagattatcgagcccttttttatgaatattagaaatgttctgccgtgattcacccagcgactcggcaatttccttcatcgtcgctccgtgaagataaatattcgtcagcacgcttttttgtttatcggttaacgtctgaagcgcttcgtataaatcacggttttggacatgctggctcaaatccccctgcttccgcagaaactcttcatacgcgtcttttcccatttcatagggaagcgcttcacctccctccggctgatccaccgtcagcggatagcgcttctgatttttacggatgcgtttgtcaaaatcgatggagaaaatccggatcatagagttcatatatttgatgatccggatttccttataaaactgcttaaaatggtcgtccaatgattttgcatccttctcgtctgaatgttccagcacatttttaaatttctcgtaatgctttgggtcacttaaaaaatgtttaacgatcggatgtttcataatttccttgcattttgaccgtaaaagaacttgatagtccataaaaccgccccctatttaaattaaatgaaagaaagcaaaaaaaagtaaactactcctttccgactaagattccgcactccttatgtcccggatttgccggaacaaaaaaaaagaccctcaaccgggatatcaggtttacaggagccgctctttctttcacttatatacatgactgcaggtcaagtcaggaggtggctgataatggatcaggtttttatagaagaaacggtcagacagatcggcaatctcggctttccggctctgattgccatgtatcttctcacacggtttgagaagaagtttgacgccctgatcgaactgatgacggaactgaaagatcagaaaatgaaaaattaattttcacagcaagttgacttttcatcggaacgcatcacttaacaaagcagaagggaaaacgaaaggcctttcacattctctttctgaaaaaacaaagcttgagaggagacgatttacatgtcaaaagaaaacaactgcaatatcccgcagccgatcagaggagacaaaggggcgaccgtcacgattccgcgcaaccttgaaagagaccgccaaaatccggatatgctgacgccgccggaaacggatcacggcacagtggataatatgaaattctctttctcagatgtgcacaaccggctggaaaagggcggatacgcgcgtgaggtgaccgttcgcgagctgccgatttctgaaaatctggcatctgtcaacatgcgtttaaaaccgggcgccatccgtgagctgcactggcataaagaagcggaatgggcatatatgctgacgggcaaagcgcgggtcacgattgttgatgaacagggacgcagttttatcgatgacgtgaaggaaggagatctgtggtacttcccgtcaggcctgccgcactccattcaggcgctgaaagaaggctgtgaattcctcctggtttttgatgacggttccttctcagaaaacagcacattccaattaactgactggcttgcccacacgccgcttgatgtcatcgccaacaatttcggtgtttcagaaaaagacctcgccggcctgcccgggaaagaaaaatacatctttgaagagcctgttcccggcaagctgaaagatgacattgtggaaggaccgaacggcgaagtgccttacccgttcacataccgcctgctggatgaaggcccgaccgctgagacggacggcggcaaagtatatatcgcggattccacaaactttaaagtgtccaaaacgatcgcttcagcgcttgtcgtggtcgaaccgggcgcaatgagagagcttcactggcatccgaacacgcatgaatggcagtattatatttccggtaaaggacggatgacggtttttgcatcggacggccatgcgagaacatttaactatcaggccggggatgtcggttacgttccgttcgcaatgggccactatgtggagaatttgggagatgagccgctcgtcttcctggaaatcttcaaggatgaccactatgccgatgtgtccctgaaccaatggcttgccatgcttcctgagaaattcgtccagcagcatctggatctgggcaaagactttacggatattctttcgaaagagaaacaccctgtcgtcaaaaagaaatgctgaagatacatcgacttgcagagttccgtctctgcaagtctcctctgtgtgaaaaggagctgaacagatgatcaatcaaaacgggacgaaaatgttttttcttcaggtgctccggtatgccctggcagccgctgccgtattattcgggtattttatcgtgatgatggctgtattttcattagccgggacgagctacggatcgatggcgtacgtcctgcttttttccgtgctttttatttttctcggtttatgttttgaaccgcttgagcggctgatgatacatagctttaccttttttgggacgggcaggctgccttttctccttttagccagcaccgttcagctgctgttcctctggatgaccgcgtatacgacggataaactgattgaaaagatttggctgtcaacgacggaggagctgattgtggcgggggtttttttcgttttggataaatgcgtctccggacaaaagcagccccgggcgcaataaaaaaacgcaggccggaatggctctgcgttttttttcatcataccgttgcgttttcatgccggattaaatcgtaggttaagcagaccggtttgttcgtgcgcggatcttttacaatctgtgcgtcaatctgaaacacgtcttccaatataccgggagtcatgacttcctccgccgttccttccttgatgacgcgcccttttttcagggcgaccatgtaatgggaaaaacgggcggcatggttcagatcatgaatgaccattaagatggtgcggccctgctccttgtttaatttgtccagcagctgcaaaatttcaagctgatgggcgagatctaaataagtggtcggttcatcaagaagcagcagctccgtttcttgagcgagcgccatggcgatccacacacgctgccgctgccccccggaaagcgcttcgatcggccggtcgtaaaattcggccatccccgtctcttcaagcgcccatttgatcatgtcacggtctttatcactcaaacggcccattccggactgatgcggaaacctgccgtaagaaacaagttcgtacaccgtcagcccgctcggcgcttcaggcgtctgcggaagaattgccatttccttggcgatgtctttcgtggatttttgcatgatcgcctgtccgtttaaatagacggcgccggatttcggtttcatgattcttgacatcgttttaagaaccgtcgattttccgcagccgttcggaccgatcagcgttgtaatttttcctttcggtatggcgatatccaattctttcgctatcaaacggtcgccataaccgacagtaagctgttccgccgataatgagttcatcgcggcagtctccttcctctatttcgttttcatcagcaaatatacaaaatacggcgctccgagcacggaaatcaccaggccgacgggaacttcggacggtgcaagcacatttctcgccagcgtatcggcaagcagaaataaaaatgctccgattaaagccgaaaccgggataagcgtctggtggcgcgggccggtaagccttctggccaaatgcggcgcaatgagtccgagaaaagcgattccgccggctgccgcaacacatgacgcggtcagggcaacggcgcacatcagcagaacgcgccgctccttttcaacccgggtgccaagccccgccgccagctgatcaccgagctggagcacatttaaatacctggctttatagaggctgaacggtaaaagaaccagcagccacggcaaaatggacagcaccattttccaattggcgttccaaatcgaaccggaaatccatacaagcgcctgcatgaaatcccgcgggtccattttcagctgaaaaatcaagagaagcgcattaaaccccgcattgacgccgatcccgaccaaaacgagccggacaggtgaaacgccttttttccaagccagcacatagatgagcagcgcagccagaaaagcccccgccaaagcgctcaccggaagcagccatgtactggccatgcttaaatcaacagctgatccttggaaaaagaagataaacaaaacgaccgccaaagacgccccggcgttaataccgagaatgcccggctccgccaagtcattttgagacacgctttgaaaaatcgcgcctgaaaccgcgattccggcgccgaccagcaatgacagcaccatgcgaggcagtctgaattcaaataaaacgagctgatcccgggcatccccctgtccgaaaaagacacgtagcgtatcaagaggcgcaatccggatcacacccatgtttaaactgataaaaaagacgatgcatatgagcaaaaacgtaacggccatgaccgccagcggttttttcgattttacattcattacagccctctcctttccctgcgcgccaaataaaagaaaaagggaacgccgataagggcggttaaagcgccgaccggtgtttcaaacggcgcattgacgagtcttgcggcaatatcactgaagactaacagaacggcgccgaataccgccgaacagggaatgatccacctgtaatctaccccgactaaaaatcgggtgatatgcggaatcaccaagccgataaaagaaatggctccggcgactgagactgaagcccccgtcaagaggacaacgacaaacattccgattactttcacaagcgatgtgtactgcccgagccctttggccagctcctcacccaagctcagcaccgttactgagcgcgcaatcagaaatgccagcaaaagtccgataaccccgaccgccaacagcagctgcacgccttcccatttcacggaagcgactcctccggcgtaccagaacttcacatcctgggcgacatcaaaacggatcgcaatcgcgcttgaaagccccgttaagaaatagccgactgccgtaccggccagcgcgagcttcaccggtgtcagcccgccttttgaaaacaggccgatgccaaacacaataagcgctccgattcccgctcccgcaaaggaccacaaaacaagtcccgccgcagacagtcccggaaaaaaagcaaatgccaatgcgatcgcaaatcctgaccccgacgtcacgcccataatggaaggctcagcaagcgggttccgcgtcagcccctgcataatcgccccggacacagctaaaaaagccccgacgagcgcggcggcggcggttctcggcagcctcagatcgcgtatgatttgatgagatgtattttgcggctgaaagtgaaagagagcatcccacaccgtccgcagatgaatatcggcagctccgatggaaacagacagagccgcgccgatcaataaaaccgcaataccggcacacagcagcacagccgcccggaatgaacgcgccgtccactggatttcactccctgatgccccttgagccgtcattgtctgtttctttttcaatagacccaacactcgttcttcctttctcaaaacaagaatggtaatgataatgattatcaatgacttgtttcagtatagcacttttatcttctcttttaatagacctaatttcatataaaaaaagaaagtttttcttaaaaaagagcgtgcttctctatgaaagcagtgatataatcacactgataatgattctctttatcactaatttttatgaaagaaggaatgtcagatgttccatacatacaagaaaatcggcgcagcgctgattaccatgctgctcatcgccgctttggccgcatgcggcaattcttcagacacgaaaggttcttctgaaaaagaagaaaccatcacgtataaagccgaaaacggcaatattaaaattccgaagcacccgaaacgggtcgtcgtcatggctgacggctactacggcgacttcaaacagctcggcatcaatgttgtcggcgcgccgcaaaacgtatttaaaaacccttattacaaagggaaaacaaaaggtgtgacaaacatcggcgacggcacgtccgttgaaaaaatcattgacttaaagccggatttaatcgttgtctggacgacacaaggcgccgatattgaaaaactggaaaaaatcgcgccgacaatcgccattaaatatgacaagctcagcaacattgatcaattcaaagagtttgcgaaaatgacaggcactgaagataaagcagacaaatggctggctgaatgggataagaaaaccgctgccgctaaaacaaaggttcaaaaagcggtcggctcaaaaaccatctccatcatgcagacaaacggaaaagacatctatgtattcggtaaagacttcggccgcggcggaagcatcatttatgacaaactcgggctgaaggccacaaaactgacgcaggaaaaagccattaatcaagggccgggctacgccagcatttcactcgagaaactgcctgacttcgcgggagactacatctttatggggccatggcaggccggcggtgacgacaaaggcgtgcttgacagctcaatctggaagaacctcgatgccgtcaaacaaaaccatgtctatcacattgatccgatcggcttctatttctcagacccgatctcacttgaaggccagctcgactacatcacaaaaagcttaacgaagtaaccccgaagccgctgtcacagcggctttttattacgctttacacttgaccgttttttcagcggacgcactgaccatttaaccgcattcgagaccattcattatatacacgccgtcaaaacgtaacccgccgccgcaaacaaaaaagacatctcacagacgtgagatgtctttttgtcataccgattgtctgttgtttgcaaatttctttgagacgaaaggatataacagcaaaccgacgaagaacagcccgataccgagaataaaggtcgttaaatcggccgttccggtaataatgacgtaaaaagaataaatgcaggcaaggatggcgatgataccgtctcttactcttgaaccctttatctcgtcatacgtttcacccgtaaaaatgagcttcaggctgtaaaacgctgatacgagatacggaatcagataagcgagcgtcgccgccgtcgttaaaaacgtaaatgcgtcactgatcgtccgggaaataactgaaaagataaagatctgtgacatcacgttcgttacgattaacgacacaaccgggcttccctgtttattcgtttttgcaaaagcagccggaaagtctcctgatttcgccgcttgatacggaacttcagagccgagaagaatccagccgagcatcgttccgaacagacacaaaatcgccagaatcgccatgatgacgcttcccgcattgccgacgatcgcgtacaatacgtcaacaaacggtttttccgagccgacaagcttaccatgcggaagcacgcccatcgtaatcaatgttacgatgatatagatgccaagcgcgatcaataatccggtaatagtggcgcgtttcacatcgcgctgcgaacgggcgcgcccggataagatgactgccgattcaattccgacgaacgcccataatgttgaaatcgccgcattgtggatctgcccgccgattccctcaactgtgtgaggacctgtttgaaccggaaaataaaaatgatcgaaaaacgacgtttgaaacacaaataaacctgcaatgataaagaaaataaatcctaatacttttgaaaacgtcgtgacgaaatttaatttactcgcaccgttaatgctggtgacgagaatcgtgtgagtgccccataataaaaccgtacatacggcaaacgtcagcagctggccgagcgtaaccgcctgaccgccgatcgaaaacatttcacgcttatccgttaaaatcgggaaaaatgatgttaaatatccggcaaggctcgtgatgatcgccacgttgctgatccagctcgccacccagtagccccacaccatcgtgaagcccgctgcattcccttttttccgatcgctgaacagcgcacgcgcatagctttgcggccccgccgtcagctcaggcttgcggatggataagtggccgaagaccagcgcgatcattaacacaccggctcccgttaaaagccatgccgatgtggcgccgaacgggctcgcgatttttgcgagcgaactcggaagcgaaaagatgcccgagcctaccatatttcctacgacaaacgccgttaataaccaaaaaccccattttttcgtctgttccattcctgtacctcctggttgttcattcgtacggaccagaccccgagatcatatttacacgcaaaaaaagcctgaacaaaagtccatgcttaaagaaacacacacacccttgatctccggatagccctccgcgaaaaagcacgcggcagtcctgcacttattcagatacagtcccagcataaagaaggatcggctttctttacacttcggcgctgatgcctttaacacatgttttgcggcccctatcagcctggcatgtgcgactcatcatcaagcgcaacctctacctcaccgagaaagagtgaggatttttatcattcaattctactcagaggttatcagagataaaaagatctgtcaaagggaaaaattagatggaaaacggatagagcgttcgccctacccgtcttatatggtcagcggttgttttttttcttttgaacagcttcttgaagcggatcgtctttcagagctgcaccggcgtcttcaagcgcgccttgaatgacatttttgtttttatcgctgttttttcctttttctttgttaaagaaagccatctgtatcacctctttatcaaatataggtacacctataatgtgtctttttccgcggcagaatatgcggaatccgcgtctccttccttttggcggaacaggtaaagtttgttgatcaaacatgcattctcttgatatatttgtaattcaggggattttggcaaaaataaaaaggagaagcgaaaaatgacaggaaaaacacacatcatgggaggcatcgcttcttgttccgcaattgcgtattattacgggtatgatccggtccttatgacctcagcgggtgccctcggggcgctgattcccgacatatgccatacgaaaagcaaaatcggcagaacgctgcccgttctgtccaaaatcgtaagcacggtgttcggccacagaacgtttacacacagcctgctgtttatgcttattatgtttttcattacggcatcctatattccgaatccgagcatttccgccggactgatgatcggaatggcgagccatcttgtgcttgacgcatggaccgtcaacggcattaaactgctgtttccgtccgccatccgcttccgtcttcccctttatatgagaacggggagcttttcggagcagcttgtgctggccggcttaacgattgtatcctgctattatttatacgaactggttcacggccgcatctcttaaacaaaaagcgtcttttcgcttttagggtgaggagtcatacatatgaagaaaacctttttcagcaatcatcggtttttatgcctgtccatcctgttcatgtggatgaaaacctatgccgtttataagctcggttttgatctgcagaacaattcggttcttgaggaatgtctgcttctcattaatccgctgagcttcattgtgccgctgttcggcatcgccctgctgctgacagaaaaaaaacagcggatctttctgcttgcggcgaatgtggtgctgacgggaattttaatcgcgaatacggtgttttacgggttttatatcgattttatcaccataccggttttgtttcaggcgagcaatatgggtgatatgggaagcagcgtccaagagctgtttcacccgctttacatcgctttatttttggatattgcggttttgttttatcttggtaaaaggcataaagctggtaaaggaaaagcgggcgcccgtaccgttaaagcgtatgcgtgggcatcagccggcctcatgctgtgcaaccttgcactgtctgaggccgagcagccgaagctgttcaagcacccttttgatcgtgaagcgctcgtaaaaggaatcggcctgttccactttcatttgtatgacaccatttcgcagacgctgaatgcaggggctaaagcgtttgccgatgaagacagccttgcggcggtcgcaaattacactcaagccgactacagcaggccgtccgattcaaaattcgggctcgccaagggacgcaatgtgatttttgttacactcgaatcaacacagcgttttgtaatggatgagcgggtcaacggacgggagattaccccgtttttaaataaactgcgggaaaaaagttatgacttcactcatttttatcagcagactgaacagggaaaaacctcagattcagaattcattactgcgaattcgctgtatccgtcttcaagcggcgccgttttttttacaaaaagcggccaccggttcaatacgatgtaccatatgttaaaagaccgtcaatactattcagccgttctgcatgccaatcataaggccttttggaaccgggatgagatgtacggggcattcggaattgaccgttttttcgacgcggatgaatttaaggtgacgcaggaaaattcaacaggctggggcctgaaggataaggaatttctcgaacagtcagcggaaaaattaaagaagcttccgcagccgttttacgcgagcctgctgactttgaccaaccattttccttttgaaattgaaaaacaggatcagctcattgaagaaccggacacaagcagcgagttattaaaccgctatgtgacgacggtccgctatgaagatgaggccctgaaacactttttcaagaagctgaaaaaagaaggactgtatgacaacgcgatgatcgtcctgatgggagatcattacggtatatccgaagcccataatcaaggacttgccgaattcttagggaaagaggaaatcactccgtttgatacggttcagcttcagcgcgtgccgtttatcattcatattcccggggtgaccgaccgtgagccggaaacgattgcttccgccgcgggacaggttgatgtaaggccgacgctgcttcacctgctcggcattgaaacgaaaggcagcattcagttcggcaatgatctgttttccggagagcggaccccgtttgcggtgctgagaaacggcagctttatcacggatgatcatatttatacgaaaaatacgtgttacagccgtaaaacgggcgaaccgctttctgacatgagcgcgtgcagcgatgagaaagaaaaagctgaacaagagctgatgctttccgataaaatattaaacggcgacctgctgcggttttataagcaaaaaaaaaatccctccatataggagggatttttcatgtttcatatatgagccgtccggtcattttcgtatcatatccggataattgagaaagctgagacttgaattcctcagaattgaggatgtcctgcacgctttgaacaagctcccggttttgttttaacacaaccacatcgtactgttcactgatcaccgggataaagtccgtgcctgccatatgcgccgcatgctgcgacccgactccgatatccgcctttccgcttgatacttgtgaagccgctgacagatgatccatgacaatgtcatgatatccggcgacatcattcggcgtaatgctgaatgatctgagctgttcatccagcaggaccctcgcgcctgatcctttttcgcgattgacgatacggacatcctttcggctcaaatcctgaaagccctgaatgttcagcggattgccctttttcacatataatccggcctgacgaagtacgacatgaaaaagcgcaaacggctcccctgaaagaatgcgcttcacatacgggatgttatactgccccgtctccccatcgtacaaatgcagactgacgatgtcacaagccccgcggtacatctcgatcaggctgttcaaactgccgctgtacttgcggagcggagccgcctgtattgtttgttccagctgtttgctgaggaggtccatcgacacatcctgcccgctgatgataacggactgccttttttccggctcccgcccgcgggacgggtcaggcccttctgctgcggatggcttttttgacattctcatgtttgctttatattgttttaagtcctcttcatcgaccctcatctgtcttccgaccctgtacgccggaatgagtcctttttttatcaaatcatatactgtcagtttggagaccttcaaaaggcccgcaacttcttctattgtataggaagtggcttctgtcatattatcacgctccgtttttattataactgttcagatattgaaaaaaaaccgcaccatcacgtacaattgcgttataattagtttgatctaatgatatttagctataaggggtgcacaatgttgaaaaagaaagcgacactactcacaactgcggctatggccgttttcctcgcaactgcgggctgctcttccggacaatcgtccaaaggcggacaaaacgaaaaagtcacgctcaccgtttctgcggcagccagcgctcaggatgcacttgaagaaatccagaccaactacgaaaaatcacattcaaacgtaaccattcaagacaacttcggatcatcaggcacattgcaaaaacaaatttcacaaggcgcgggagctgatttattcttctcggcagccgaagataaattcgaaaagctcgttcatgacggagatatcgataaaaaggacagcacggatcttttgaaaaatgatctcgtcatgatcgtgcctgagaaaaacagcgcacacctgacacacctgaatgacctgaaaaaagacagcacggaaaaaatcgcgctcggcacacctgaatccgttccggccggacaatacgccaaacaatcattgacggcattatccctgtgggacaaggtaaaagataaagtcgtctatgcaaaagacgtgcgccaggtgctgtcttatgttgaaaccggaaatgtcgatgcagggcttgtctataaaacagacgcgctgatttcgaaaaaggtgaaaatcaccgatgaagcgccggcgaaaacgcacgatccgatcgtatatccgctcggcattgtcaaggatacaaagcaccgtaaagaagcagaagcgttttatcagtatctgcagtcggatgaagcgatgaaagtgtttaagaaatatggatttactgccaagtaacattacggcttcggagtttttcaccccagtcgtactgtcgtttcaggtggctttggcgtcgggcttcgccgtcatcattctcggaacgcttgccggcgcctggatggcgaaagcgcgatttcccggaaaaacggctgtggagacgctgtttatgctcc

SEQ ID NO: 73 - DNA, 4363 bp, Bacillus amyloliquefaciens
gttgagcccgactcagcggcgaatgacgctgtcggcagagaaagaagcaaaaccaggccgaataaacttgccatgacagttgagaaaaatttctgtttcattttaaatccccctaaaaaaaatttgctgattgttcttaaaaaagaacgaccatacctataaaaatttaccatcaattttaatggaagtaaatggggttatgttcctatattttctcaaaaataatcaaatcacgacaaaaaaacgcctgattttgattcaggcgtttttttcgtccgtttctatcggaataaatttaaaaatctccccgctctgaaccgagtcggcgagccgcttcagccaatgataataagctttcgagctttcaagctgatcatataactgccgcgcttcttcctgtaattccgcgttgcctttctcggccagcaaaacggactgcaaatccgcctgggcctgttcaatggcggataaattcacctgaacttcacgatcccatttcggcgggaagaaattcgtgaaaaacgtaaagaaatctttttccgctacaaacgtatgcttccgtgtgccgcggtgaaaggtttttttaaccacatttaaatcctgcagctttttgacgcctgtgctcatactcggtttgctcatctgcagttcctcacgcatttcgtcaagcgtcatttcatccctcatatacattgttccgtataaaatcccgacactccgtgtgattccgtaaagatccatcgtctctgcaatggaatcaatgacaagatccctggcttgttctatagctgcgaattctggattctcatccatactgtccctcttttccacttgaagtttaaatttattaagtcatttctttatgttcttaatcttaacgaatcatgacaaaatgtcaaaatctaaacggactgaccgggttttgacaggcaaaaaaacatgtgttaaattaatattgttaaaaacattaaatttttatttaacaaacttacttttcggtaaggaggacttttatgagcaaaacgctttatatcggcggcgaatggatcagtgcagaaaaaaaacagacccgccgtatcattaatccatttaatcaagaagaaattgcaacggtatgcgaaggagaccggaacgatgcggtgaaagccatcgccgcagccagaaaagcatttgatgaaggggagtggccggtgctttccgggctcgagcgcggacaatttgttctgaaaattgcggaattaatcagacgcgatctgaacgaattagctgagctggaatcgctcgatacaggaaaaacgattgaagaaagtaaagccgatatggatgatatcgcaaatgtatttcaatattatgccggtttggcggataaagacggaggcgaggtcatttcatctccgattcctgattccgtaagtaaaatcgtcagagagcccattggcgtatgcggacaaattacgccgtggaactatccgctccttcaggcgagctggaaaatcgctcccgctcttgcggccggaaacacgatcgttttaaagccgagcgagattactccgctgacaaccattaaagtctttcaattaatagaagaagccggtattccgaaaggggtcgccaatctcgtgctggggccgggcgcctctgtcggcgacgagcttgcgagaaacctcgacgtcgatttggtctcttttacgggcggaattgaaacaggcaaaaaaatcatgcaggcggcaagcggcaatgtgaaaaagattgccctggagcttggcggcaaaaatccgaatatcgtatttcaagatgcagatctcgaaaccgctgcagatcaagcgctgaacgccgtgtttttccatgccggccaagtttgttcggcagggtcccgtcttttggtggacgaagccattcatgatgaatttttagccgagctgatcaagcgcacgaaacgcatcaaattaggaaacggttttcatgaagatacggaaagcggtccgctgatttccgccgagcatcgggccaaagtcgaaaaatacgtagaaatcggtatcgaagaaggggcaaaactggaaacaggcggcaaacgtcctgatgatcccgcccttcaaaacggtttcttctatgaacctactattttctcaaactgcaagtctgatatgcggatagtccaagaggagatcttcggccccgttttaacagttgagtcattttcttctgaagaagaagtgatcagacttgccaacgataccatttatgggctggccggagcggtatggtcaaaggatattgaaaaatgcgaacgcgtagccgccaaactgcggatgggaacggtatggatcaatgatttccatccgtatttcgcgcaagcgccatggggcgggtacaaacaatcgggcttcggccgcgaactcggcaaaatcggtctggaagaatacacggaaatcaaacatatttaccgcaacacgaaacctgcggctgtgaactggtttcaagcataacgaggaggagatacaatatgacattaaatatgaaagtagaaagcatgcataaattccatacattcgaaatcccgacagtcattaaacacggaatcggtgcgattcagcacgcgggaagtgaagtcagagcgcttggcgtcacaaaagctctgctcgtaacagacccgggaatttataacgcgggagtggcaaacccggtcattgaatctttacaggaagcgggcatcgaagtcgtcctgtttaacaaagtggagccgaacccgcctgtacgtcttgtaaacgaaggatcagaactgtataaaaaagaaaactgcaacggccttgtggctgtcggcggcggaagctccatggatacagcgaaagcgatcggggtagaagcgacacacgaaggaagcgtgcttgattatgaagccgcggaaggcaaaaagccgctggaaaaccgtattcctccgctgacaacgatcccgacgactgcgggaacaggttcagaggtcacacaatgggcggtcattacagatgaagaaagagaatttaaattcaatacgggcggaccgcttatcgccgcgcatttaacggtcattgaccctgagctgcacacgtccatgcctccgcatgtgacggccatgacaggtattgacgcccttgcgcacgccatcgagtgctatacgatgaaatttgcgcagccgatcactgatgccgtcgctttaatggccattgaatatgcggcgcattatattaagcgcgcgtttgcggacggagaggatttggaagcaagatacggcatggcgcaggcggcgatgcttgccggcctttcatacggcagtgaatcagcaggcgcggcgcatgcgatgagccagacgctcggcggcatcatccctgtcgctcacggacaatgcgtcgcagctatgatggggccggtaatggaatacaactggaaaggctatccggaaaaattcgcccgcatcgccaaagcattcggaatcgatacaagcaacatgacaaccgaagaagcggcaaaagcgtccgtcaactggatgtatgatcttgtaaaagatttagaggtgccgagtttagaagaacaaggtgtgtctccggacatgattgaacgtttatcaaaagaagccatgaaagatccgcaaactttcggaaatccaagagatttgaatgagaaagcatacaactggatttacaaacgctgcttcgacttaacgccgaaaacggtataataaatgaaccccgctcctttacagagcggggttttttaaggataatgtcaagaaaaaggcggtggtggctgatgtggaaacgcataacagcaaagacggaaggcgtatatatagcggataccgaacaatttgttaccaaaaagatggacaagcttcgtgcggaatacggcgggttccccggtgacctgcatttcggactgacaaaaaaggccggcgcgcgtgagccgatgtatgaaagaggaacagaaatttttaaccggagacaaatttcaatcgtgtccatggaggaatgtgatgacattgcagagaagatggggatttctcatatctttcccgaatggctcggcgctaatatcgcaatcagcggtttttctgcactgacgccgcttaaagaaggaagcagaatgatatttccaagcggtgcgtctctgttgtgcgagggagaaaatgatccgtgcattcagccgggagaagtcattcaatccttttatccggatcagccaaaactcgccgcggcgtttgtgaggcacgcgatgggcaggagaggaattgtctgtattgttgaacgcccgggtgatatatgcacgggagatgcggtcaccatccattcttatgaaccgaaacgcgccaagaaaaaaatcgagaaggtct

SEQ ID NO: 74 - DNA, 985 bp, Bacillus amyloliquefaciens
ctttttcctttcaatttcctctataacataaaaaagccgctttcatccctcaatggaagcggcttttttgtccggtcatatcagtcatataccctcaaagtgaatctcccatggccaaatagcagaatcactatacgatagaatatgttctagcaaccggaatgactggacatctatcattttttctattctttttttcatgtgttcttctattctgtcttcgtttacaatatggttaaagtaaggaggtgatagaacaatgctggaaggctggtttatgtggtttattttattttgggtcatcgtgatgatcggattgctgtctatcggcgggttttttatgtttcgaaaatttttaaaacgcttaccgaaagaagacggccggtcagaactggattggcaggactattatattgaaaaaagcaggcacttatggaatgagggtgacaaggcgtttttggatgaattggtcgcccccgtgccggagctctttcgggatgtagccaaagcgaaaatcgccggaaaaatcggtgaactttccttagcggaggaagctgaacaaataaaccgtgatttaatcatcaggggttacatactggccactcctaagcgggatcatcaatttttaaaaaagcatctccgtgaaaaacagattgatcttactccttatcaagccctgctcaaataaaaaacctttccggcggacggaaaggttttaattcatctgaatatcagcggtcttcagttcattcgaaagtttgcggtaagacaaaaacatcgcgatgcgccacgggacaatcattccgaaagcaagaatccaaaacattccgcttaaagctccgtaatcaatcgtcgtgctcaaaatggatttcatagcgattctgataaccagcaaaccaatcaggataaacacaaacgcttttgaccgttttaaatagatttcattatttttaatctcaaatttagatgttttaatcagaaaaat

SEQ ID NO: 75 - DNA, 5596 bp, Bacillus amyloliquefaciens
ctgttttcattatacaaggggggaataggatatctactcttttttctcaaacgtgaggtttccgtgttcccaactaccagtacaatcagagatgtttcaaattgagaaaactccaactgtttcacaatatttaaaagcattaaaataaagataaaatgatgataacaaggttagcgaatagttgacgctggttaaattgtgaagcgcctctttgttatgaaactagagtgttaagacttgactctttcatcatctttaacaaataaatcaatttttttaattaaacttggaatttccccatcaacttggagatcatcttttgtaataaattgaagtatctgtacaggagaaatagagattttccattcgctttgtatatatttatttatacttgaaattaactcttttccaggtacaacagacaagcggtaaaataaatcgctccaattttcctcaaattcattagttttattagcaattatggttgccactgagattccgctattctttttcctttcaatttcattatggattaattgtcccataacataattttttttatcatctgtaacttctaaaagaatattttccgtattgaattcttgaactacctctgtttgaattctcttagctcttgcttttaattttgctgtgatagctttacctattgctgaaggtatcaataaatagttttctatctctttcttctctagcacatgaataaacgaaactttattactaagatttctcttaaggtcatttacttgttcaacagttttgtagtctctatcaaacaagcatgaaaccattattttctcacgtaaaactcctgaaaaagcccaatctgcgtgtccaattttctcccattgcgaagccccattaataggtataacggttaactcaccactattaaataacgtaagataccctaatatctttgcgaacttttctaagtatttactatcttgaccttctacaaacaacactcgtttaccccttgccaatcgtgttaaatgaatattctgggtagatcctaatatttcaacaacatcttgcaatcctataagatcagttaatctttttgcaaacttctttcttttttcaataactagaacttcatctggttctacttcgtttataatttcaattgaatgtgtagctataacaacattcacttgcaaatcccttaatattgtaatgagctttctttgcaaatctggatgtaaatatatctctggttcatcaattacaatcaagtctgcactcttagatttaattaaatgtgtcaataattgtaaccaaatttgaaaaccattacctgataaaaaaacttctcttggtatcctgttttcataacaaaacatagttaaatcatttgaaagcagatcagtccttttaggctgttctatactcatacctgaccatgttttttctaaaatatctttaaattcattaaaatcctcctcatcgtggtaccaaatgttcctaaatagtcgaggtgcgcgatggctacttttgaacctgctaacgtagtctatttcccttactttctcatcttcttccaatggtcccaaagtgggtactattgaaagatttaaaggaaacgtctgtttaaaggcagttgtactttttatcgtcttagtctctccttcagtgtatagtaagggttcattatctttagtaaattctattatcaatgtctttttgccggaaaatctatactctattacagtaggctcctcactatagtcagtatgaataaatttcaaattgattggtatacttgtttctgggatataaagtccagataccactttacctctagtattttgtaaagtctttagtttatacttagaagcatatctatatgaccctgctaacacctttaacccatcaattacagttgattttccactattattaggacccaccaatatattgaaatcattaaatgaaacagagaaattctcatgtgtcttaaagtttttaaatttaattgattttagcaattaaagcaccctcactaaattgttttatgataatattaccatgaaattattcccgttgaaataagagggattcctacttttaagtctattatttgaagcatttaaataagtttttccatcatatagatttaaaacgtcccattgtataccttgtttttaaagataacctaaagagttattccaagaacatttcctaacaaaacatatccctatctctttaaaaagttagtagtactattacatataaacctcctccaaacttgggtgagtataaactaatctataagattcatggtttagaacctcttagaaatctatattctttttgttgtttaactgattaatttttattaatgccatgctcaatacatgtaagcaatgatccgacatcccatgctgaagtaaccgcgattcagatgcggtccggacgcttcaaacatatcagcttgacgattacgtgatttacacaagctgtgaaccctgccatgtgtttaggtaccatttattaggtgaaaccataagcaatttattacgcttccagccacccagatgcctccgaagcaggcttcaatgacactcatatatgatgaaatcaaaaactgtggtataacctgctcaattgcaggtttatttttgtatgctcaattggttaatgaagggaatcagaaacttggacagaatccgtgaatataatgatacagtactgcttacgctcatttcggggaactttgttcgtaataaaatgattttcagccaactcataaggagggacattgtgtcacagcctaatttgcccaatatcacccctgtcgttacactttccagagacgataccattaaccttcttctttcgtcaattgctatggaagaactggaaatggcacatattctgaatgcagaagggaaaaaaatccaatacgcgctcggaacgattcccggattaacaggacccccgtcaagtcttgctgatattcttaacctgaatgagagcgtccgtgatacgcttgacagcttaatgaaacaggagcttcttctcggttcaaaattggacagtatctcaaatatccctacactggcgggaccgactggtgctacggggccgacgggaccagccggcgggcccgcaggacctacgggagcaatcggaccggccggagcgacggggccaaccggaccgacgggggtcaccggtgcgggtcttcaagggattgttgcttttaatccgctgatcgcccccacttacacaaccggacaggttgtcttgtataacggcagctcttacgtcgcaaatgtaaacagcccggcgggaacccctggagcctcagctgactatacacttttagctgcggcgggaagcaccggcgctactggcggcaccggaccgaccgggatcaccggaacaagtctgacagcaacttccggctatgcgagcaatacgggcggcggtgttgtcgcagttattgccggcggcacgaccatttccttaccgaatgaacaaaacctttctgcagatattacggctaatgccgcaaataccatatttaccgttgctccggcgggacggtactatatctcctaccatattaatttaacggccggcctgcttgtaagttcgcgtattttaatcaacggcactcctcctgcaagttcgattatcgccccggtcgcgtctttggcaaactttaataactcctttattgtgactttgccagcaggcagcaccatccagcttcagctgttcggattattgggtgcggccacattgctcggaggaagcgccggtgcagctttaaacattattcgattatcttaatggaacatgcaaaaaaaggatcaggcgtttgtccgctgatccttttttaattgagacagaagctcttgtgcgggtttaaattgaggattgaacttcaccgattttttggcgtaagcgatggccgtcatatcatggtttaatgcagcatggcatttcgccatataataaaaagctctgaaatcggcggcaccttttaaaatgaagtgatcagcgttttctccttcaacctgcgttccgttttcaaatgctttgattgccgctctgtacttttccaaatgatataatacaaggcctttataataatgaagattgctgtaatcaggatatagcttgagcactttttcaatcccttgttcggcttcttcataccgtttgagctcaagcaatattgtatatttcaaataatacaggagagacggaggcattcgtttttcgcttaaaaattgaaaaattgagccgttgacaagatgtaatgctttttcatagtcttttattctgtagcattcacttgccaaatgatagacaagccacggatcaggattttcctctgaaagctcttcatttaaaatgctgatattccgtttatgtttttgcttgatcttttcttcctgctccaagtagccgtagtgatgaatcacacatgggagcgtgaaaaaagcatggttttcttcctcattgggagccgagatattctcgtgaattctgccttgatacagaaggcctttatgattgcggaacagtctcggctgcatgctttcaaacgcttcgttttcatcgagctgcttccccgtataattgatgattttcaaaagcccccggctcggtaatccgtcatgaagcagcgaagttaaaaagcggcccgtctcctgatcgagctcttcatccgcgtcaagcactaaaatccaatctccttcggcatgctgcagggcgtaatttctggcctttgcgaaatcattctcccattcgaaatcaaacactcttgcctgaaagcttttgcatatatcttttgtattatcttgtgatccggtgtctgcgatgacgatctcatcaacgatgtcttgtacacttgataaacaacgggagatgtatctctcctcgtttttcacaatcatgcaaagagtcagtttacattcagcatttccgctcattttctcacctttcccgattttggagttgttgattgaaccaaggccgttcaggagtgccgttcatcgttatgatgacaggccgcacccatctgacggcaggttcggcagtttccgcatcccattcctgaagctgcctgacagcccgcttcgtaatgggatgcgcccggaattcgcgcgggctttcaaaaatgaattttttcgttcgttccgtaactgtcttcatttcaagaaagtgccgctcatacatctgcttctgctcttcttccaggctgatcattaaaaacagacggccgcctgtttccatctgccagcggcacaatgcggagaacagcctgatttcttctttgtaatttgaaccccttcttttatccacggtcacagataatatatgtaacagcgcaatcgtgagacaatgcatggcttcaaaagatgcctgtttcgcttttgaaatgcttggatacggcatatgcttcacccgtctctttttttatgaacgctccccgccttttttcttccaaccgcagtcctcacaatccccgcactcacagcagccaatgcggccgtaaaacaggccgtcacacggatcttccggatcactgggatcgtctggattccacgggtcatca

SEQ ID NO: 76 - DNA, 6121 bp, Bacillus amyloliquefaciens
gggatattttcctggtttccggtaatttcggcggcctttatgacttcaagggcttctatataacttttgccgagcttcaggatgctgctgtattcattgccgattccgatatagatgggagtggggatcttctgaaagtgaaaatgagtcagcagtttgtggatgaattcagatgctgccgaagtgccggagcttttttgcgagaagcttgcgacgacgatgacaatattggaatcaatggttaagacgtgactgactttatcccgcaaattcaagtacgatttgatgttttccttcacatcttcgactgcctccccatccccatttgcggcgtgcaggacgactactgaaaaaaccgacggcagcacggcgttcatcttttccgcttcccgcctgaactccttttcagaggagaattgctgaaagatcgcccgtttcaccaggtcttccgctctttcttctttttcttgtttcagccggttcgttttatagatgatttttccgacatgaaatgaagtttcatataaaaaatcgagctcctcgtccgtcaagtttcggtcgagctcctgaatccagatgtagcccatcacttcccctttatgttttgcgcttacaaccactctctgattcagtccgatactgtctattttttcgacacggaacggttcaggaacggttttcagcttttcgatcaccccgtccttcagaaacctttcaaaaatctgcacggggcatttttttgaaaatatcgtctgctggttggcggagtcgaagtgattaatgtaataagaattataggcaagcaaaaagaaatccgcgctttccagaataacgggcttctgcaattcataactgatgaaatcaattaatttatcaatgtccgtaaatgaaaaaactctctctaaaagctcttccatacctatttctcctatgctctttttatctttatcatactctgcggggtgactttttgtatagaaaaaaattcacctattcccaaaacggcatgatccgaaagcctgtatcgtgaaaagaggaaaaagggcggtcccttcttcctctcgttccttgcttttattgagaaagtgtatcacggtaatcatgaaactgatctgtgacatcttttgacggagcctgtgtcaataagctgacgacaaatacagcggcaaggcttacagcaaagcccggaatgatttcgtacaaaaagtctgaaagaccggcattcgcccaaatgattacggtaatcgctcccgcaatcatgccggcgagtgccccccatttcgtcatccgtttccaaaataaactgagcagtacgaccggcccgaatgacgcgccgaatcccgcccatgcatagctgacaagaccaagtatcgtgttgtttttctcccaagcgagcaccaaagcgatgattgacaccgcaagcactgccattctccccagaaatacgagttccttatcagaagccgaacgcctgaacatggacttatacaaatcctctactaaagaactggacgtaacgagcagctgagacgaaatcgtactcataatggccgctaaaatcgcagaaatgagaaatcccgtaataatcgggtggaacagaatgttgccgagctgaataaaaatggtttccggatcagccagcttcagtccgtgctggtggtaatacgcgattcccgcaagacccgtaaacagcgcgcctagtgcagacaaaatcatccatcccattccgatccgtctggcgcgtttgatttctttcacagatgtgatcgccataaagcgcacaataatatgcggctgcccgaaatagccgagcccccacgcaaataaagaaataatgccaaggacggtcgtccctttgaacatattaaacagttccgggttgacggaacggatatcggcaacggtttcccccgggccgcccgtatggaaaatcgtcacaatcggtacgagaataagcgccacaaacataatgatcccttgaacaaagtccgtccagcttaccgccaaaaagcctccgaacaaggtgtaggcgacaacgacgcctgtcacgacccacagtcccgtgtggtaattcaaccctaaaatgctgttgaataagacgcctcctgagaccatgccggatgatacgtaaaatgtgaaaaagacgagaatgacaagacccgaaaacagtctgagaagcttcgtatgatcaccgaaacggttttcaaggaaacccggaatggtgatggaattccccgctttttcggtatacgttctcagcctcggtgccacgaaaagccagttcgcccacgccccgagcacaagcccgagcacaatccaagcgccgcttaatcctgtcgagaacatagcacccggaagccccatcaagagccatccgctcatatccgccgctcccgcgctgagcgctgtgacggcagggcctaaagaacgccccccgagcatgtaatccgtcagatttgacgtccgtctgtaggcgaaataaccgataaacagcatacccgccatatagatacaaatggaaataatcaactgaatgtttgctatggcatttcctcctccgctttatatgtttatggtgaaatggacaccccccgcgaggaggatgcccattcagtccctcttaaaacatttcactgattgttttcgcctgcatgtggagggccaaataatccgggccgcccgcttttgaatcagtgccggacattttgaagcctccgaacggatggtagccgacaatcgctcccgtacaattgcggttgaagtacaggttgccgacatggaattcctgtttcgcccgttcaatatgtttgcggttatttgtaatgaccgcgcctgtcaaaccatattcagtattgttggccacttctaaagcttcatcaaagtttgacactttagaaaacgccacgacaggcccgaaaatttcttcctgcatgagtcttgctttcggatcaaggtcagcgaagatcgtcggcttgataaagtagccttttgaatcatctccggtgccgccgcttactaaacggccttcttcttttccgatttcaatgtagctcatgatcttgtcgtaagaaccttggtcgatgacaggccccatataaacatctgcactgtcaggtttagcagttacttttgattccgtaatttcaatgacacgctctaatacttgatcatacactttttcatggacaactgcacgtgaacctgcagaacatttttgtccggcaaagccgaatgcagatgtgaagatcgattgagccgctaattcaatgtccgcatcctcgtcaacaacaaccgtatctttaccgcccatttcagcaatgacgcgtttcagatgctgctggcccggctgcacttttgccgcgcgttcaaaaattctcgtaccgacttcacgtgatcctgtaaatgtgataaggcttgttttcggatggtcaacaagataatcgcctacttctgctccgcttcccggcacaaagttgactacgccttttggcaatccggactcttcaagcacctcaacaaattttgctgcaataacaggtgtagcactcgcaggttttagaaccactgtgtttccagtaacgatcggcgccactgttgttcctgccatgatcgcaaacaagaagttccacggcggaataacaactgtcactccagtcggcgtgtacacatattggttcttctcgccttcgcggctgttgaccggtttgccttttgccagttcgatcatttggcgtgcataatactccatgaagtcaatcgcttcagccgtatctgcatcagcttcgttccaaggttttcctgcttccttgacgagcagggcggagaattcgtgctttctgcggcggactttggcagctgcgcggaacaaaacggccgctctttcttcaggggatgtgtatctccactcttcgaacgctttcgcagctgcttcaatcgcttgctcagcgtgctcctgggacgcctttgacacttttccgacgacttcttctttatcagccggattgattgaaacgattttcgcttccgtctctaccttttcaccattgatgacgagcggataatcttttcccagatactcatttaccgtcgcaagcgctttcttaaattcttcaacgttcgattgatcttggaaattcgtgaatggttcgtgtttataaggtgtagtcattgtcatctctcccttttttacttcttagtcatccctttaaaggcgaatgcgatgtttgaggggcgttcggcaagccgtctcatgaaatagccgtaccagtcatccccgtaaggcaggtagactctcatgcggtatccttcttccaccaggctgagctgggtttgcgagcgcatgccgtacagcatctgaaactcaaaacggtcgtttggaatgccgtgctctttggcaagctgttttgtaaactcgatcattttgtcatcatgcgtggcaactgccgtataatgtccttttaaaagctgtttgcggatgagtcttttataattttcatcgacgtcgcttttttcaggataggccaccttttccgattctttataggcccctttgacaagccgcagaaacggattcagcgggctgaggtcatcaagatccttctccgttctgtacagataagcctgcaccacggtgcttacatattcataccggctccggaagtctttaaagatatccagcgttttctggcatctcgtttcatcttccatgtcaatcgtcaccatgactttatgtttttcagccgtctggaggattttcgtcatattttcatagacaagatcgagatctatatcaagacctaaagacgtcatttttaatgacacttgggaattcagctgttcatcagcgattaaggcgatggtctgcatgcactcctcggtgcgttctttcgcgacatcaccgctgttgacaaattcccccaaatgatcgacagtaactgacagcccttggctgttcaaatgtcggattgtcgggatagaactgcggaaatccattcctccgatgattttgccggctgccacacggcttccccagcttcgcgccatcttattgagaaagctgctcttggataaaaataagaaaaaatctcttgtaatcacttccaaccttaacaccccgcaatctaagaagtatttgtatgagtctattgtaaatggacaaaacatcctctcacaatattctaaaaatacaaagattctgataaatttttgtggttttaccacaatcagcttcttagatagcaggcggattatgccgaaaaaaggcggacggaaatgacggcaatcgtcaatttccgcctttttacccccacgcctcttcgacggtctgaatcaatagctgattcagttcctccgttatgtcaggtttcggcgttttgatcattttgacatagtgcctgatgcgttctatttcttcttctataaatgcatgaatgatcgtatttctcggttccggggccagctcctgaccgctttttttccttgtaagcagtgtattgatttcagaaatgagcgcttcatccgtcaataaggcatcggccagtacgggaaatgacatcggcggtacggagccgaacgtttcaatccatctgcaggcaaggagaggacgcagaacataaaaatactttttaatcttcacttcactgccccgcaattccgttttttcattccgttttgccatattgagataatgatagatgccggcttcaggcgaaaaggcgcggtttttcagttttcgaagcttttcagccgctgagaaagcttcataatagatcatctcagaagagagccattccaaaagaggcggatttgattttttaaaaagccgcagcgcttttctcagttcccagccgctgatgtcaagcatgtcatgaatcggctcttctatgacatccctatgcggttcgatcgaaaagtaccattcttttttcggcacatagagaaaccgtacatcgtagtcgctgtcgcttgacggaaacccccatgcgcggctccctgattctacggcataaagcaccttgacgccgtgctgtgcttcaattcgttttaattcttcgatgatcctttgttccatcagtatccgtccttttccgtgatcattcctgaaaaaagcccaagtacttgg

SEQ ID NO: 77 - DNA, 1628 bp, Bacillus amyloliquefaciens
actttatcggagagtttgatcctggctcaggacgaacgctggcggcgtgcctaatacatgcaagtcgagcggacagatgggagcttgctccctgatgttagcggcggacgggtgagtaacacgtgggtaacctgcctgtaagactgggataactccgggaaaccggggctaataccggatggttgtttgaaccgcatggttcagacataaaaggtggcttcggctaccacttacagatggacccgcggcgcattagctagttggtgaggtaacggctcaccaaggcgacgatgcgtagccgacctgagagggtgatcggccacactgggactgagacacggcccagactcctacgggaggcagcagtagggaatcttccgcaatggacgaaagtctgacggagcaacgccgcgtgagtgatgaaggttttcggatcgtaaagctctgttgttagggaagaacaagtgccgttcaaatagggcggcaccttgacggtacctaaccagaaagccacggctaactacgtgccagcagccgcggtaatacgtaggtggcaagcgttgtccggaattattgggcgtaaagggctcgcaggcggtttcttaagtctgatgtgaaagcccccggctcaaccggggagggtcattggaaactggggaacttgagtgcagaagaggagagtggaattccacgtgtagcggtgaaatgcgtagagatgtggaggaacaccagtggcgaaggcgactctctggtctgtaactgacgctgaggagcgaaagcgtggggagcgaacaggattagataccctggtagtccacgccgtaaacgatgagtgctaagtgttagggggtttccgccccttagtgctgcagctaacgcattaagcactccgcctggggagtacggtcgcaagactgaaactcaaaggaattgacgggggcccgcacaagcggtggagcatgtggtttaattcgaagcaacgcgaagaaccttaccaggtcttgacatcctctgacaatcctagagataggacgtccccttcgggggcagagtgacaggtggtgcatggttgtcgtcagctcgtgtcgtgagatgttgggttaagtcccgcaacgagcgcaacccttgatcttagttgccagcattcagttgggcactctaaggtgactgccggtgacaaaccggaggaaggtggggatgacgtcaaatcatcatgccccttatgacctgggctacacacgtgctacaatggacagaacaaagggcagcgaaaccgcgaggttaagccaatcccacaaatctgttctcagttcggatcgcagtctgcaactcgactgcgtgaagctggaatcgctagtaatcgcggatcagcatgccgcggtgaatacgttcccgggccttgtacacaccgcccgtcacaccacgagagtttgtaacacccgaagtcggtgaggtaaccttttaggagccagccgccgaaggtgggacagatgattggggtgaagtcgtaacaaggtagccgtatcggaaggtgcggctggatcacctcctttctaaggattttaacggaatataagaccttgggtcttataaacagaacgttccctgtcttgtttagttttgaagga

SEQ ID NO: 78 - DNA, 10559 bp, Bacillus amyloliquefaciens
gcgtgtctttcagcgcggatttgagcgcttcaatatcgtcctgccgaggcgcgacataggcgcaaagcgcggtattgcccgctttgtcttccacggccgtcaccgctgcgtcgtgaacgtccgcaagctgggcgaggcggacttcgatttctgaaagctcgatccggtagcccctcactttgacctgctggtcgatacggccgatgtattcaatgccgcactgcgcgttccatttgacgaggtcgccggtccggtacatgcgctcgccgggcacgaacggatctgcggtaaaccgcttcgccgtttcttcttcacggttcaggtatccgcgcgccagaccgcggccggccacacacaattcaccggcaatgccttccggctgcacctgatcgccgtcgccgagaatataaactctcgtattggcaatcgcccgtccgatcgaaagcgatccttcctccggattgatgacgccgcttgtcgcgacgacggtgttttccgtcggtccgtagttgttgacgatcgtgtacggctgtttcaccgcccgcttcagcttgtcgccgccgacgagaagcatgcggagagaggtattttccagctccataaattgttcggccagctgcgtcggcaggaaggtgatggtcacgccgttctcctcgaaatagtgatttaagcgggtgatatccagccggatcgcttcgtcaatgacgtgaagctccgcgccgatggtccatgccgggaacatttcccagatggaggcgtcaaaaccgaagcccgcgtatttggcgcttttatcatccgccgtcatggcgaatgcgtcgtgatgccagaagcacaggttcaccagcgcatggtgttcgaccatgacacccttcggctgcccggtcgttcctgacgtgtaaatcatataagcgagatgatccgccgttgtttccgtctgcgggttcgcttcatcgttttcatcaagcggcaggctcagaatggagcgtccgccgtcaagcagaatcgtttctccgttgtagctttccggtacgtccagcgcttcctgtgtgagaaggagcttggcgccgctgtcctgcagaatgtagctgatgcgctcttccgggtagtcggggtcaatcggcacaaatgccgcgcccgctttcaggacgccgagtacacccgcggccatttccaaggacggtttcgtcaaaatgccgacacgtttgtcagccgtgacgccgcagtccatgagaatgcgtgcgatgcggttcgcccttgcgttcagctcgccgtacgtccatttcgcgccgttgtatgccgcggccggccggttcgcgtagcgggcggccgtttcttcaaagagacggtgaaccgttttgtcccgcggcacagaaattgtttttcctttccatgcatcaaggagagcttgtttttcagcatcgctgatcagtgaaatctcaggcagctttctgtccgggctttctgccgcttgcttcagaatccgcaggaacccggcgctccacttttcaattgtttcttttttaaacagatcagccgcatattcaaactgaaggccgaggccttcttgatccgtaaacccgccgagtgtcagatcgaatttcgccgtgccttggttcgactcatacggagtgatgcgcaggttctccagttccagtgtttctttatccggatcttctgtcgtcaccatcacctggaacaacgggttgcggctcatgtctctcggcaggtcaagctttccgatcagatcctcaaacggataatcctgatgcgccagcgcgtcgagattggtttgtttcacctgttcgagcagcccggcgaaggtttgctctttgcgcgtttcattgcgaagcgcaagcgtattgacaaacatccccggcatttcctgaacttcggcgctcgttcttccggcggtcaccgagccgataatgatgtcgcgctgccccgtgattttgctcaaaaagacatggaacgcggcgtgaagcaccatatgaagagtcgctcccgatgattccattaattcacgcaccgctttttccgtttcacaccccgctctgaaacggacggattgtcctttaaaactttggaccggcggacgggggaaatcggtcggcagattcaattcaggaagctcgccggaaaatgcggagagccaataacgctcattgtctttcatccgttcggcctgctcaggttcattctgccagacggcgaagtctttatagtgcaggttcggcgacggcagacttccccctttataaaggtgagcgagctctttgaccagcatgcttctggacacgccgtcggcaataatatgatgcatatccagcagcagcagatgtttcttttcattcagtctgacaagagcggtccgaatgagcggagccgcgctcagatcaaacggcttaatgaatgcctgaatgataagatccgctttctcctcgtccgctgcttcaaagatgtgcaggtcgatgtcagcctgttctgcgatctgctgcatcgggcggccgttttgatcgataaaggacgtccgcaaagactcgtggcgattgatcatctgattgagggcttcctgaagccttgaaatattgacttctccttccatcagaagaacggacggcatattatagctgattgtctcccggtcaagctggttcaggacgtacatccgtttttgggcggatgataacgggtacgcgtctgcactgtctgccggtgtgatcacccgatatccctcagataccgccgatttttcgatatatgcggcaagcaggcggacagtcggctgttcgaacagcgcttttaacggaaccgttttgtccagttcagcctgaatattggcgaggagcatcatgccttttaaagagtgcccgccgtaatcgaagaaattatcgtcgatgccgagcgtatccgtaccgagtgtctgtttccaaatgcggcacagcttttcctccaattccgtttccggcaaggctgaaactgtttgcgccgtttggctgacgcccggtttcggcagggcgtttttatcagtttttccgttggctgtgagcggaatgcggtctacctgcacgaaataggccggaagcatatgagacggcagtgtttcggaaagctgtttacgaagctcagagcctttcagctcgctgccggctttatagtacgcgcacagttccggcagcccgccttcgctgactgcgagaacgaccgcctcctgaatgccgtttacgcttaacagcacggtttcaatctcttttaattcaatgcggtagccccggattttcacctgatcatccgcacggccgataaattcaatcgtcccgtcaggaagcctgcggacgacatctcccgttttgtacatcaggctgtccggtgaaaaaggatttgagagaaatttctccgccgtcagctgcggacggtgaagatatcctcttgcaagccccttcccggtaatataaagctcgccgcttgcgcccggaggaacgagctgcattgctccgtccaatacaagcgcgccggtattcgcgatcgggcggccgatgacgggacgctgctcatattgatcaaggcgctccatattgatccgtccggcaatggcgccgatcgtcgtttccgtcggcccgtagtgattgatgaagtcggtatgggcgtatacgtcatgaaacttgcggacatcggacgtgatgatcttttctccgccgagcaccactaaacgaagcgggctgaaacggcgttctgccgcaaaacgggctgtattgacgatcatatggaacaatgacggcgtcagtttcatatacgtaatgccgtttttctgtatatactcaccaagctgatcaggcgcggtgtacgtctctttcggcacaatgtgcagctcgccgcccgcctgaagaatagggaatatagccgtatagccgagatcaaatgcgtaagaagacagcagcacggatttgtcagcttcggtcaaaccggcttcacggctgaaccatgtgacataattgattagattgcggtgctccagctggacgcctttcggtttgcccgttgttcccgaagtataaatgatatatgcaagctggtcggcgccgggcttcgtttcaagccggtcggcgctttcgttctgccattctccgtcttccattacgaccgtttttcctttataaacggcggccgcggtcatgtttctctcattgacgaccagaagcttcgttccgctgtcttcgagagagtagcggattctctcttcaggagtctccggatcaatcgggagaaatgccgctccggctttcatgacgccgagaatcgcggtaatcaagtcggccgaacgatccatcataatggccacgatgtcctcactgcccgttccgcaagcctgaaggtggcgggcaaaccggttcgagcgttcatcaagctcacgatatgtcagacttgttccgcccgcaaccgccgtgagatcaggcgttttttgcgcttgccgttcaaacagcgaaacaaaagtgccctcaggcagatccgcttccgtacgtttttcatcagaaaggagcgcttcccgttcaggagcggacagcaggcttgcgtcggccagctgaatatccggattttcagcgcaggctttaatcagattgacaaaatgagcactccagcggcggatggtttcgtccgcaaataaggctttcacgtaatcaaagctcaatccgacctcttctccgcgttcagccgcttctaaggaaagatcaaatttagcgacatgatgatgcatggagtatgaagaaatctccaaatctccgagccgcagggccgggatctccatgttctgcatattaaataacacgctgaacagcggactccggcttgtgtccctcattaacggcagtttttcaattaattcttcaagcggatagctttgatgctcaaaagcttgaaggctcgctgttttcacctcatccagaaattgtttgaacgtttttttgccggcaggatgcgaccgaagcgcaactgtgttgacaaacatgcccggcacgtcttggagatcaggatgctgtctaccggccgccggagacccgactatgatgtcttcctgccccgaatatttggacagcagcacttgaaaagcggctaacaagaacatgtacatcgtcgtatccgtatcagccagcagcttcttaatctgcgccgtcacctgtttatcaagcccgaagatgacgcgttccccttcaaaactgcgctcggcaggacgcgggaaatcaagcggcagatccagcaccggcagatcgcctttgaacgtctcaagccagtaggcttcgtgctgatcgagatttgctttttcacgctgccagactgaaaaatccttataatgaatctttggcagcgcaagctccgtgccttgataaagcttcgcaagatcaccgatgaaaatgcccattgagcttccgtccgtaataatgtggtgcatgtcaatcagcagaagatgccggtcttcttcaagccggatcagcttcgaacggacaagcggcgcgcggttgagcgcaaacggtctgataaaggcttttgtcagctcttctgcatcttcttcccggccctcggcggtttcaagctcaaacgacacatttttatgaatggtctgcacgacttctccatctgccatgtcaaacgacgtacgcagtgtctcatgacggttgattaatgcctgcatggcctcctcaagacgctttttgtctactgatccttccagcagaagtacagcagggacgttgtagctcgtgctggcctgtccgagctgattaaggatatacatcctgcgctgtgctgaggaaacaggataatgcttctgataaggcgcttgtcggatcggttcaaactgctgctcctcctcgctctcatgctgcaaataatgcgcaagctcctgaatggtcggcttttcaaataacactttaatcggcacttctttttgaaagtgctcctgaattttagcggtcatcatcatggcttttaaagaatgtccgccaatcgtgaagaaattgtcagtcacacccgcttttacaccgagaatgccttcccaaatgtccgcgagtttctgctccgcttccgttttcggcgctacgtattctttttgaacagcttcagcctgaggctcaggcagcgcttttttatcaatctttccgttcgccgtcagcggaaactgattcatctggatgaagtgcgccggaatcatgtattccggaagtgattccgaaagcgttttgcgcaggtcttccggcgaaagggcttggtctgcggtaaagtaagcgcagatttcattttcatccgctttatttttccggatcacagccgcagattccgtcacattctccgcctggctgattttcgcctcgatttcgccgagctcgattctgaaaccgcggacctttacttggttgtcaattctgccgagaaactcgatcgtgccgtccggaagccacttcgccaagtcccccgtccggtatatcatttcatccggtctgaacggatcgcgtaaaaactgcttctccgttaattcaggcagattcacatagcctcttgccactccgcttccgccgacgcacagctcaccgggcgcgccgatcggctggaggctgcggttttcatccataatgtacgcagtggaatttcctatcggcttcccgatcgggatcgagccgtcgtagtcctgatcaatgagaaaactcgtcgaaaacgtcgtattctccgtcggcccgtagccgttccaaagcgacagctccggtgatgccttcctcactttgctgacgatatgcggcacaagcgcatcaccgccgatgatgaggtgccggagcgtgttaaacatgccggcatccttttgggcaagctgattaaacagcggagacgtcagccacatggtcgtgatccgctgctctttcagaaattgggcgaattgtccggcgtcaagcagcgtctcttttttcaccggatgcaatgacgctccgttcagcaatgcgccgaagacttcgaaggttccggcatcaaagctgacggctcccgtttgcgccatccggtcttcttcatgaaccggcacgtaattcgaatgtttgacgagcctgatgatatttctgtgttcaatcatgacgcctttcggtttgccggtcgatccggatgtatacatgatatacgccaagtcgttgccgccagcggggagattcaagtctgttccgcttaccgtttcatccgcgctttcatccagcatgacgaccgggacttgcaatgcgcccgcttgttcttgatatgcctgaactgtcagcacgagccgaatcgagctgtcttccgccataaagcggagacggtcctccggaaaagccggatcaatcggcacatatgcgccgcctgcttttaggacggcaagcattcctacaacggtttccgcagaccggtcgttcataatagcggcggtccggcctttttccagcccgctcttcacaaggtgtctcgccaggcggttggccgcttcgttcacttcacggtaggtccattcgcgtcccgcttcttttatcgcgatacttgcaggcgtccggtttgcctgtgcttcaaacaaacggtgaacggcctcctcttccggaagcgccgttttcgtatcattgaatacctcaacaatctgccgctcttcttcacctgaaacaaggccgagttcccgcacgggcgcgtcaggcgttccgaccgccgctttcatcatgcgggtcagatgatgcgccgttcgttcgatggcatcatgggcgaaagccgctccgttgtatttgattttgacagtccacgtttttcccggatacacgatgagattgaaatcaaagctcgtctgctcaaaagcatgttcaactttaatggaaaatccgagtctttcctccatgcccccgttttccagctctttgtccagcggatagttttcaaacgcgaccaaatgatttaagaggctgccgtccagggcggagcgcttttgaatgtcatagagcggcacataatcatagcgctcggcttccacggcgtttttctgaactgccgccatcacgtccgaaaaggctgcacctttgtcaatcttgattctgacgggaatcgtattgatgaacagccccgccatcgtttctatgccgttgatttctgaaggacggcctgatacaacggtgccgaacaccacatcgtctgtatagttgtatttgctgagcaccgcaccccaaacggcctgaaacaggttaggccccgtgacttgatgccggttggcggtctgctgaatctgtgcgaccagctcttcatcccagacaaaagaatattcttcattttggtagtctttcttttctgctgccagacggcccgggagcaggctcggctgttcgaaatccgccaggcggctgctccaatattgttccgcctcctcataatcccggcctccgagccatttgatatagtcagagtaaggtttgccctgacttcccccggcgggccggccggcacgaagcgcttcatagttttgaaacaggcttttcatcaaaacgcccatactccagccgtccatgacgatatgatgattgctccagacgagatacagctccttctcactgagtctgaacaccgccgctttaaagagaatatccttcgccagatgaaagccctgctgctgcacgccgcgtttatagcgttcaatatattcggtttggcgcgcttcatctaattgactgatatcttcatagtgcaccttcgtcttccgctccgccaatacgacttggcgcggtttttgaagctgctggtgcacgaataccgtacgcaggatgtcatatgtccggatcagctcattgacgcttttttcaaaaagctccagctgaaagcttccgtgaatcctaagctctaattgtgtgaagtaggaggaagaatgcggatcaagcagcgcatgatacagcattccctcctgcatcggtgtgagtgcatacaccttttgaattgattttttgctcatatgtcacctctgtcttttctgttagagaatttccattaatttatcaagttcatcaagcgtcagatcatcatcgccaagatcactaggcgtaagctcaggtccgtcttgggccaggcagtgatctatgattttcaagaggtgccctttaaagctgtcactgaacgattgaatggttttttcatgaaattcgagagaatgataggcaaacgtcatcgtcatctgcccattttctataaatccgacaatatcaagcgcattcggcttctctgtgtcagggctcagcgattgtcctgacggcatcccggatcttgtaaataagccggaatccgacatctcattaaactggcctaagtagttaaagctgatatccggatcaatctcaaatgaaagattctctttatgctcgggcgccgttacataacgcagaatgccgtagccgactcctttgttcgggatgtgtctgatgtcttctttcatttgtttcagctgatatgaaagatcgtcggcgtgcttcatctcaaggatcatcggatacatgctcgtaaaccatccgaccgtccgggtgatattcaagccgtcaagaatgtcttcgcgcccgtggccttccaaatgaacgccgatcgtgtcttcacccgtccactctttcagcgccagtccgagcgccgtgagcaggatgtcgttcatttcggtgtgataggcttcatgtacgtttgtcgtcagctgttcagtttgttcaggcgtcagagagaagctgaccgttctcgtatgtttcatgcgctgatcaccagactgcctgtctttcggaagctgagtgcatacctctttttcctcaagctctctccagtaatccgcttctttcagaaacgccttcgtatttgcgtattctttgattctctcagcaaattcggcgaatgaatgtgttttcggcggcagcgctggttcattgccttgcttcagctgcgtataaacggacgtgaagtcctccagtaaaatccgccaagatacaccatccacgaccaagtgatggattgcgagaagaaggtggtctccatcttcagcccggaagagcccggctttcagcagatgtcctgtttccagtgaaatactgctttgaagacggtctgcttccctttcgatacggtcctcatggtcttcagcaggtccgttcagctcaaagacgttcagttcaacagacacatcctcaagtcctctgtaatacggtttttgttcacgataaatcatccggagcgcatcatggtgcaccgtcaggacatgtaatgttttttctgttatctccggatcaaagccgtctttcgcgtgaagcatgacggattggttccagtggtgtttgtcggtgaagtttttctcaaagaaccagcgctggatcggcgttaactccgcttcgccttcgacaggtccctggtcggcctgcttgccttccgttcgctccacataggagacgagctcttcaatggtcgggtgctggaagaggtctttcatctccagcttgtagccgtgctggttcagacggcttgccatttggatgcctttgatcgagtccccgccgagcgtgaagaaa

SEQ ID NO: 79 - DNA, 10292 bp, Bacillus amyloliquefaciens
attgtagccgacaccgccgtcttcaagctgttggagcacatacatccgtttctgcgccgaagacaccggataggtgtcctgtttttgcgcaggctgaatcgcttcatacgggctctcttccaagtcctgaataaccgaagcgagttcttccaccgtcggccgggcgaagatgtcctgtaacggcacctgaacaccgaactctttggcgatgcgggaaacgagagccgtcgcttttaacgaatggccgccccgctcaaaaaagtgatcccggatgccgacagggccgtttttcagcacctcttcccaaagggcgcaaagcttcatttccgtgacgttccgcggggcggtgtacgcctgtctgtctgccgctccgccgggagccggcagcgcgcggcggtcaagctttccgctcggcgtgaccggccattcggtcatctctataaactgagccggcatcatgtaggccggaaggcgtgccgcaagctccgcccgcacgtcatcgctttcccgtccttcgatataggcgtaaagcgcggtatctccgtgttcggtccgggcagtgaccgccgcctcacgaatgccgtcgatgcgccggatcgccgcttcgatctctcccggttcgatccggtagccgcggactttcacctgtccgtctgaacggccgagccattcgataaggccatcttctgtccagcgtgcgatatcacccgtctgatacatgcgttctcccggataaaacggatcattgagaaagcgctcctccgtcagctcaggccggttcagatagccccgggccacccctgtccccgcgatgtacagctctccgatacagcccggcggcagaagctgtttcttttgatttaaaatatacagccgcatgttatgcccggaaatgccgatcggaacattgtgaaattcttttccttgcggcaaatcaaagtacgccgcttctaccgtcgcttccgtcggaccgtaggaatttgtcaattccgttccaggcagaaggtcataaaaacgggaaaccaagtgcgggcccaattgttcaccgccggcaaaaaccctttttaagcagatctttttgatcggctgttttctggaatttatatattccaagaaagcatgaagcatggatggcacaaaatgggccgccgttatgcggttattctccaatgcgttcagtatcatttcagggtctttctcgccgccttgcggaaggaggaaaacagaagctcccgcgatcggccaccaaaacagctcccaaatcgaagcgtcgaaagagtatgatgttttatgcaaaatgatgtcagaatcacttaatccataacgcgtttgcagtgagtataaaaagtttacggctgaccgatgttcaacctgcacgccttttgggcgtcccgtagaaccggatgtatagatgatataagccaatgaatcaggttttaccggaacgttagggttggccgcagcttcagggtttcctgtttgtccgcttttcagagagatcatttctccctcaaaaagatctggtgcgaaaagttctggttctgccagtaagaatttcacgccgctgtctttcagtaaaaagcgaatccgctcttccgggtaatccggatcaatcggcagatatgcaccgcctgcttttaagacagcgtaaatgccgatcagcatgtcaggagaacgccggcccataatggaagttttatcctccagccttatgccgcgcttgatcagctgatgcgcaagctcgtttgccctttcgttcagttcctgatacgtaatcgaaatgtcatcagttaaaatcgcaggacggtccggcgttttttccgcctgctgttccagcagatcatgaagagactgatgaagcggaaacgctgttttctgcacggggctgaaatcttgaagcagagacgcttcttctttttctgtcaaaacagaaatatcgtctaattccaagcccggatcacccgcggcgttttcggcaagtgtcgtaaaaaatcccgcccatttttgaatcgtttttctctcaaacaaatcggtgctgtattcaaactggcagtacaattcaccggcgttttcagagatgtacagtgataagtcaaatttagaaatcggcaggctgacgtctgccggctgcagttcaagtccggctgccctaagcttctgctgttccatattttgcagcgcaaatgttgtgtcaaacagcggatttcgggacatgtcccgcggcacaccgagcttatcgacgagctcttctaacgggtaatcctgatgttcgtaagcctcaagcgctgtttggcgaatttcctttaaatattctttgaatgtcatgcttccgtcgggacgcgtcctgaaagcaagcgtattgacaaacatgcccagaacggcgtcaaggtcggcatgaggccttcctgcaatcggagacccgacaatcatatcttcctgtccgcttaaacgggctaacagaaccgtgtacacaccaagcagcgtcatatacagtgtgcatttgttttctttcgccagctttttcaactgagctgtatgtttttcattgatgacaaatgacacccggtctccggaaaaactccgcaccgggggacgcggcttatcagccggcaattcaagcacgggaatctcaccggcaagccggttcagccagtactcctcttgtttccgatatgcggcgcccgccataaatgattgctgccagacggcataatctttgtattgaatccgtaacggcggcaggcttctctcagcatacagctcactgaattcacgtatcaaaagattgacggatacgccgtctgaaataatatgatgcatgtcagctaaaagcagatgccggtctttttctatttggacaaatcccgcccggaaaaggggcgctttgccgagatcgaacggccggataaacgcttcggctgattgttcttttgtaaatgcaaacggcacgtcgtcatgaatcctctgcacgggcaggccgtttttttcttcaaaggacgttctgagcggttcatgccgcccgatcaattccttgaacacggcttccatcctatctcggtcaaacggccccctcacctctaaaacggctggaatgttatagctgacaccgccattttcaagctggtgaaggacgtacatccgtttttgggcggatgagacaggatatgtttctttcatttctgtcttttctatggatgcgaacgggttctcttctgcttcactgatgattttggcgagttcttctacagtcggatggctgaagacatcgctcagcgggatttgcacactgcactctttagctatttttgcaacgagtgccgtcgcctttaatgaatggccgccaagctcgaaaaagtgatcgtgaacgccgatcgggccggtttgaagcacttcttcccatatgcgggtaagcttcagctcggtcacattccggggagctgtatatcgacggcctgtggcgtatgccgaagcttccggaagggcccgctgatcgacttttccgttcgcagtgagcggaattgagtcaataaaagcccatttgaccggaatcatatactcaggcacctctttagccaaatctctccgcagctgagaaggatcagtcgcttgtgagacgctgcagtaagcgcataattcattttcgcccgactcattcgtttgaatcagaacggcagcttcttttacggcgtgatgatttgccaggacggtttcaatttccttcggttcaatccggtaccctctgatcttcacttgatcatctgtccggccgatgtattcgatttggccgtccgcacgcagtcttgccaaatctccggtccggtacatgacggcgtccgttctgaacggatccggcaaaaatttctctttggtcagcgccggattgttcacatagcctcttcctgtattcgctccggaaatatacaattctcccgcaattccgagaggctgaagatgccggtttttgctgagaatatacatcttgttatgatggatcggtttcccgatcggcggatgttcaggtatgtcatctcccgcagaaatcgtatacgttgaaaccacatgagtttctgacgggccgtaatgattatgcagatgcataccgtgtaaacggagcgtctgcctgaacaaacgcgaaacggtcagctgctccccggccgtaatgacatgcttcacacagcggggaaaagactgtgcataaccttcttcattgaaaagcattttgacaaacgcagtcgggaaaaacacaacttccgtgttgtgctgatcaataaacgaaaacagctgagaaacatcccgtttgattgattcgggtacgatacagagggtgccgccgctcaagagtactgaaaataactcttgatagcagacgtcaaacgccaaagatgcgtactgcagcacatttgtgcaaaaatcaatgtctgtgttcgtcaattggtcagaaagcaggttggccatatttttatgttcgagcagcacacccttcggtttccctgtcgttcccgatgtataaatcatataaaggaggtcgtctgccgtattaatggattgcacattgcttccgtccgcttccgtcccggcctcttctatgtatgtaacttgcagcgcttgttccacggggacggactgatgccgctctgttacaacatggacgcagccgctgttttcaataacatatcggatacgctcctttggactgcccggatctatcgggacaaaggcgccgcccgcttttaaaataccgagaacggccgccgctaaagaaggggaacggccaagcatgacgcctaccggttcctcccgctttaaaccgcgctttttcagcaggcgggccagcttattagccgattcgttcagttctttgtacgtcactgactcacattcataccgaattgcgatttgattcggcgtttttgcggcctgcctttcaaacatcgcatgaaccgtgtcatattcaggtttttcggtctcttcagaaatcggcgcaagcagctgcgctttttcccctggagtgatgatttcaagcttgtccggcgtgatgtccggtttgtcgagaacctgggagacgatgtgtgccaaatggcctttgatattttcgataaattggcggtcatacacgcttgaatcgtatctcattttcaaatgaatctcgtcacccggcgccaccatcaggtaaaaactgtagttggtttcgtcttccatgctgaaatcatggatgtgaaaaaggtctttcgtgtctcccttgctgttcagcacatcaagctcctgttcaaccggataattctcaaagacgagaatgtggtcaattaagccttgttttacctgtgaattcgcctgtatgtcataaagcgggtgatagctgtatgcctgtcctttcaaagcgtccttttgcacgtttttgatcagcttttgaaacgggatgtccgccccgctgatccggacaggcacggtattaataaacaggccgatcattcgctcgatgccttcgatttcagacggccttcccgaaatgacagaaccaaaaaccgcatcttctgtctggttatacgcctgaagcaaaatgccccagagcgtgtggaaaatggtgctcagcgtgacctcttctttcacggccagctctttcagcttagccgtgtcctcttttgaaaaggaaaacgtcacttcctcttgtctgctttcgccggcttttttctgcttcggcagaacagtctgctgctcaaagccttcaaggtatcgctcccagtacgaagcggctttttctttatcttgctccatcagccacttgatgtaggtcccgtacggcacagcgggctcaagcgttaacggtgtccggcggagccgcgaggcgtatatctggaagaactctttcagcacgattccgagacaccagccatccataatgatgtgatggaaactccatatgcacgtatattcacattcaccggtttgaagcagcgtcacccgcatcagcatgtctttttgcagatgaaaccctttctcacggtctcttcgtttggcttcttcaatatacttgatttgatcagccttatttaaattagtgagattttcctcaataatgctgacgttccgctcttttaatacgacctgctgcggcactgacacgttctggctgataaagatcgttctgaaaatatcatgtctttcgaaaagggcatgaacgctctcttcaaacacgcgggtgtcaaccttccccgttattgaaaaggaggcctgctcggcgtaagcctgtgattccttttgcaggagggaatgaaaaagcattccttcctgcatataagacagcggataaatatcctgaattgcattcttttttgtcatgttataatctccctgtcgcctttttctacagttcctcgacaaaactcgctatgctgtccaaatcatcagatgttaacgttttgctgctaaaatcactaacggttttttctgcttcctctttccctgtgcagtgcgccataatatcacgcaaatattgctgtaaggtttgcagcagctgttccatcgtttctttgcggaagcggctcggcggatagctcaaactgaagtgaagtttgttttgtgcggccatcgcgctcatttccaccgcttgttcccgctgccatgtcggcgtgatgtcgtgcccgcttgcaagaccggacagactgaacgtgtgctgatcttctgtatcattgaattgccctaaatagttaaagctgatttcaggcgcttgtctgaagcggattgttttttgttcaggcggtgtcatgtattttaaaatgccgtagcctattcctttatccggtattcttccgagtgtgtctttgaccgtttttaccgccgttccaagctcagcgcctgctgtgttcaagtcaatgagcaccggatacatggaggtaaaccagcctacggtgcggctgatgtcgagctccggcatgatgtgctctctcccgtgcccttccatcgcgatgcgcaatctgccgccccctgtccagtcccgtaaagccaaagctgcggcagtcagaagaatatcttgcgtatcggtatggtaggcccggttgacctgctgaagcaaaacggacgtttcttcttctgtaagcgtaaagcttaccgtttgccgaatgctgtcggctcccgtctgatgctgcggtttttcataaggaagttcggcggctgtttcttcttcaataaaacgccaatattcttcttcatgcatcagcttgctgctttttgcgtattctgaaagccttacggcgtattgtttaaacgaatcggtctttggcggaagctggaccggctgaccttttacggcttgagtgtaagcggcagataaatcctccagcagaatacgccatgacactccgtcaaccgccaggtgatgtacggtgatgaataaataatccccggaccgggttttgaaccagccggcttttaataacggccctttttcaatatccatccgctgttggagcgcagccacttcagtttctatttctctttcccaagtatctgtctcagacagatcccaaatgtccaagctgtacagttcagcattttgaataccgtgattgatttgtctgaaactttcgttttctgcactgacggtgatccggagtgcatcatgatgaatgacaagatgcttcaaggcttctttgagcggctgtttatgcaatgcgtcagagctgaacatcatgacggactgattgaaatgatttctgttttccatccgctgtgataaaaaccagtgctgaacgggtgtccaaggtatgtctccttctaccggccgctgatcgctgactctttccgctttccggataagaggcgcgagctccttaatggacgggtgccggaataagtcacttgccgtcattttccacccatagcgtccgagccgtgcggaaacttgcagcgctttgattgaatcgccgcccaactcaaaaaatgagtcctcaatcccgacttgttttgtgccgagcacttcctgccagatcacggaaagctgttcttcaagctcattgcggggagctgtgtacgcggtttgaagcgcgagctccggttcgggcagatttttccgatccaatttaccgttcggcgtaagcggcagcttctcaagttccatcatataggccggaaccatgtaattcggcagttgccgagaaagtaaagaacgcactttttctgtatccatgtccgcctgcagactcatatatgcgatcagttctttattgccggactgcccggttctgactgacacggcagcttctttcacgccgtccaggctcctcagtgcggcttcaatctctcccagctcgacccgataaccgcggattttcacttgatcatccatccgcccggcatattcgatcgttccgtccggcagccagcgggctaaatctccggtgcggtacatccgttctccgggaacaaaaggattagggacaaatttttcttccgtcagctcagggcggccgaagtatcctcttgccacaccgtctcctccagtgcataattcgccgatgacgccaatcggctgcggtgttcccctgctgtttatgatatatgcggttgaatttccgactgggcggccgatcgggattgaatgatcgtatgattgttcaatcaaaaagcaagtcgagaacgtcgtgttttcagtcggtccgtatccattccatactgagagatgcggcagcgcactccgaacccggtttacatggctcggggacagtgcttccccgccgataatcaatcgggataatccggaaaacacgtgttcattttgttctgataaatggttgaacagagacgatgtcagccacagtgtcgtaatgccgttttgctgtataaatgtttccagaacatcagagtcgagataggtttcctggtcacttacatataaagaagcgccgtttaaaagcggaccgaatatttcaaatgtcgtaacgtcaaatcctaatgatgaagtaaacaacagtctatcttccggcgtaaaatcaatataattgctgtttttcacaaggcggatcacgcttcgctgttcaatcatgacgccttttggcgcacctgttgacccggacgtataaatcatgtaggccaacgattcaggtccgccgagcggttcgggattttccgaactcaatccggcctttgtttgaatatcctctatgaataaacgttttcctgaaagcggcagaccgtcaagtttatcagattggagaagaatatcagctttacagtctttaagcatccattcagcccgttcccgcggcacatcgtcaccgataggcaagtaggcgccccccgcttttaatattccgaggattccggaggcaagctctgttgtgcggccggttaataaggcgacaacgctttccggaccgacgccatttgatcggagagccgccgctattctgttagcccgttcgttcagctcacggtatgtcaagatttgtccatcataaacaactgcccgggcatcgggagtttcttttgcctgccgctcaaataaacggctgatggtttcgtgtcttgggtaatcgcttttcgtctgattaaactgataaatgacgcgatttgtttcagcattatccagtacgtgaatgtcaccaagcggtatcgcttggttttcaattacttttgtaagaatacgggtaaaataagatagccatttttcaattgtctgtttttgatagatatctgtattgaattcaaaatcaaagctgatggaaccgtcagacccttctgacgcgtaaagcgtggcatcaaactttgcggttttatgacttgtatccgcagcttgagccaaatgcagcttatttaacaccagggattcacgctccatattttggagcacaaacataacgtcaaacagcggatttcggctcatgtcccgctgtacgccgagccgttccaccagctcttcaaacgggtagtcttgatgctcatacgcctcaagcgccgcctggcggacttccgccaagtaatcggtaaaccgtttgtctcctttcggctccgttctgatggccagcgtgttgacgaacatgccgagaatcggttcaaggtctttgtgcggacgcccggcaatcggtgagccgacgatgatgtcttcctgcccgctcaggcgcgcgagtaacgtattgtacgcggcgagaagcaccatatacaaagtagagccgtgatcccgggcgatgcggtgaaggccggatgccgtttcagcgtcaagcgtgcacgatacgctgccgcccgcaaagcttctgaccgccggacggggcttgtcagccggaagctcaagcaccgggagc

SEQ ID NO: 80 - DNA, 5027 bp, Bacillus amyloliquefaciens
ccttcggatcttccgtctgctcacagatcgccactttatagccctttttaatcagctgttcaatataagccgccgcggaatgatacggcacgccgcacatcggaattttatcagccgaacctccgtctctgcttgtcagtgtaatttcaagctcttgtgacgctttttttgcatcttcaaaaaacatttcataaaagtcaccaagccgaaaaaataaaaaggcatcttggtgctctgcctttatcttcaagtattgctgtatcataggcgtgtaactagccatcatttaatccctcactatgtatcttctcttatccgaatcccattataacataaacaaaagagtgatatctttatatataaaaaagagacttggggtgttaaactcccctagcctcaacttattcttcaggatctccgactaaaaattcagggttaatgtcctctaattcttcatcaagatcgtcttcccaatcatcatcatcgtcttcttcccagtcaggatttacttcgacgacgactttcgtttcaccgaccacttctgctaaaaattctctctctgcctgaaccacgattttatttccgttaggagaaatggtgacttcaagacaattcggctgctgcagcactttggcaatgacttcgtgttcgtcatctaagtaatttgtgtctctgtatctgagtttaatcacatcgacatactttactctctcggttacaacttccgtttttgtattatcggcgtaagagtaccagacgtttatatcataatacccttcaatttctacagtcttcccgatcttttcggcatcgtacttgtggttgataatccagccgcccaatatacttgacggtttttctccaggtgagatcgtgttggtgcattgggtgaattttcttcctttcgcaactaccgctttcgtaataatttccctgtattcagacattccggcaggcctccttgttcttcttcgtgttatcttatgctgggcatttgtctcatgtgcatttttataataaaaatataaaaatacaaagtttctgtttcattgtatgcagccctgcccagaaactttacttttaagtatgataaaactttccagtaaaatgggacaaaacggtgacctgatgaaaatttagtacatatcacaattagttctcaaacagcaaaaaaacacgggccgatgaaggccccgtgtttaaatagaacagctgttattcgaatgttttacttttgaaccggtttctcccgtcagcaggttgcctccggtagatgtaatgatttcgtttgtcacctgatttgagatcgtatgtgcgacaagctgaagaaggtcattgacctcaatctgggaatctctgaattcctgaatgatcggaatcccttcaagctcttcctgcagggcgtcaattttactttccacttgtttcagcgcttcaagcttttcgtagtgcttcaggttaacggcttgcttttgcagggttttaatctgattaataatcgcagagactttttcattttcgttaatctgcgcctcggcgcgtttaaaaaaatcaacttcttctgtttcagaaatcattttcgcaaggttcctagcctgctgtacaatgtctttcttagagtaaagcgtcattattatttcacctcgattgcttctcctgccatcacaccgtcaagcgaccatgttttcgcctgttcgattttgacgcgtacaatcttgccgatggcgtctttcggccctttgaagttgacgagcttgcttttttccgtatagccggcaagaatgtcagggttatttttgctttctccctcaactaatacttcgacagtcctgccttcatattccttcatttttttggctgaaatttctttcaccaaatcattgaggcgctgaagacgttctttcttgaccctcatcggaacattgtctttcatcttcgctgccggcgtgccttcacgaggagagtaaataaacgtatatgcgctgtcaaattccacttcgcgatataacgagagcgtttcttcaaattgttcatcggtttcattcggaaaaccgacaataatatcggtcgtcagtgaagcgttcggcatcgccgctttaatttttccgacaagctccagatagcgttctctatcatatttgcgcgccatcatttttaacatcgctgagcttcctgattgaaccggaagatggatatggtcaagaaggttgccgcctttggcgagcacctcgatcagatgatcatcaaagtcacgcggatgactcgtcgtgaatcggattctcggaatatcaattttacgcagttcgtccattaaatcaccgagaccgtacgtcatatcctcaaaatcttttccgtacgcattcacgttttgaccgagcagcgtgatttctttatagccttcacttgcaagtcttctgacttcctggataatttcctcaggacggcggcttcgttcttttccgcgggtatacggtacgatgcagtatgtgcagaacttgtcacagccgtacataatgttgacccagcctttaatttttccgttgcggactttcggaaggttttcaatgacatccccttccttcgaccacacttcaataaccatctcttttgataaatatgcctctgataacagttccggcagacggtgaatgttgtgcgtgccgaaaatcatatcgacaaacgggtgcttcttaaggatgcggtttacgactgattcttcctgtgacatgcagccgcagacgccgagaatcaggtccgggttattttttttgagcgcctttaaatggccgagctctccgaacactttgttttcagcattttcccggatagcgcaagtgtttaataaaataacgttcgcgtcatcaaccgaatttgtcgcttcataaccgagcgccataaaaatacccgccatgacttccgtatcatgctcgttcatttggcatccgtacgtgcgaatataaaatttcctgccttcaccgaggcctttaaattcttctgagattttaaaatcgttatgatattgaacggattctttgccccgttttttcgcatcttttaaagaaggcggaatatatacggcttcaaaatacttgctgtaatccttttcggattttttgtccgccggattcacttgtccgctttcctgcttttgcttttcattcatgttcgaatgtctcctttcaaccgaaacttccaccttcaagtatactggttaaaagcgtttggcacaaccgccagcctattattgtacaccttattgagaataagaatcaataagaaataaaaaagagggaatcatttcccccttacacaagctgaagctcttttgcggctgaacagattacttccagggcccggtcaagctcctcttttgtatgctctgccgtaataatggtgcggattctcgcttttccttgggcgaccgtcggatacacgatgctttgtgcaaagacgccgcgggtcaataaaaggtctgataatgcctgggctttttcttcctcccctattaatatcggcacgatcggtgtttcgctttttgtgagggtcagccccatttgaaccagtttgtctttgaaatacgccgtgttctcccatagcttttccatatgctccggctcttccagcaggacgtcaatggcttctatgcatgcggccgttaccgcaggcggatgagaagtgctgaataagaaaggacgccctttatggcgcaggtaatcgatcagaacctgcgatcccgcggcgtaaccgccaagcactccgatggctttgcttaatgtgcccacctgaatgtggactcttccgtcaagcccgaagtgattaaccgttccccttccgttttttccgagtacgccggaagcatgcgcgtcgtcgaccatcacaaaggcatcgtacgcctctgcaagtttgacgatgtcaggcaaaggagcgatgttgccgtccattgagaatacgccgtcggtgacgatcaggcgcatgcggtaattcattgattttttcagcaccctttccaaatcgtccatatcaacatggcggtacacctttttatctgctttcgtcagcctgatcccgtcaataatggaagcatggttcagttcgtcagagatcacgatatcctcttttgtaagaatgcttgataagacgccctgattcgttgtgaaccccgattgaaaaacaagtgccgcttctgtttttttaaagtttgccaatttcttctcaagctcattgtgcattgtgaatgttccggcgattgtccggacggacccggtacccgctccgaattcttccgcggcgcgtttggccgcttcgacaagtcttggatgcgacgtcaaaccgagataattgttcgatgaaagctgtatcacgttttcccctttgacttccaccgacggaccctgcttcgtttcaatttgtttcatttgctgccacgttttattttctttcattttatcaagctctgcttttagaaattcaaattctttcattatagaaccctccccttatggaatcaaaatgactttgccgcactggccctttctcatcaggtcaaaccctttttcaaagtcttcaagcggaaactgatgcgtgatcaccggcgtcagatcaacaaggccggattcaagcaggtgcgatacctgccgccatgtttcaaacatttttctgcctgtgatgccttggacggtaagtcctttaaacaccacgtcatttgtcaggtcaaccgtcaccggacgttccggcagactcagcatatggaaccttcccccgttggccgccatctttagtccctgtgctatagctgccgggtggcctgacatttcgcagacaaggtcgatcccttctccgcctgttaaggtgtcgatcacctcaagcggatcttccttatcagctgaaatggtgatcgcggctcccaatttcttcgcaagagccagcctgtaatcatttttatcaatggccgcaatacgggatgcaccggccgctttagccactgccaccgccatcagcccgatcggcccgcagccgataattgcagc

SEQ ID NO: 81 - DNA, 15776 bp, Bacillus amyloliquefaciens
gacacacactcgtcccttgctttgggatgagtgtgttttttattttattaaaaataaaggagagatcagaccgtgaagaagccacacattgtgattacttttcctgatggaaaacaaaaaaaataccggaaaggcgttacgttagaagagatcgctcaatcaatcagtccgagtctgaaaaagacgtctgccgccggaaaggtaaacggatcgttatatgaccttagaagaagcattcataaggatgcggcgattgaactgtgcagttttcagtctgaagcgggactggaagtgatgagacacacagcagcacacgtattggcgcaagcggtaaaacgtctgtatccgaaggtttgtttagggatcggacccgttattgacaatggcttttattatgattttgatatggatgaaacaattactgaaaaagacctggcagtcattgaaaaagagatgaaccgaatcatttcggaaaatccggaaattatcagagaagaaatctccagagaagaggcagagcagctgtttgctcatgaaccgctgaagcttgagctcttagcgggtatttcgcagactgatacaatcagtatataccgccagagcgaattcattgatttatgccggggtccgcacttggcgtctgccggacagataaaagctttttcgctcactcatgtatcaggggcttattggcgcggcgacagcaaccaaaaaatgctccagcgcatctatggaaaagcattttcctcagaaaaggggctgaacagacattttcaggtgttgaaagaggcggagatgagaaatcatcggaaattgggagcggagttacaactttttatgttttcggaagaagcgccgggtatgcctttttatctggcgaacggtcagtttatccgaaacacgcttgaatcatttctgcgttcaaagcaggatgactatgattatcaggaagtgcgcacccctatgatgatgaaccagcgtctttgggagcaatccggccactgggatcattataaagagaatatgtatttctcagaagctgatcatcagcgcttcgcgttaaagccgatgaactgccccggccacatgctcatatttaaagaaaagcttcgttcttatcgtgatcttccgattcggatggctgagttcggtcaggtgcaccgtcacgaattcagcggggggcttaatggcctgctccgcgtcagatctttttgccaggatgacgcacacatttttgtaacgcaggatcagatcgagagtgagatcgcttcggcgctgcagctgattcacgaggtgtacaccgcatttggtttttcctatgatattgagctgtcaacaagaccggaagattacatgggaagcgaacacttgtgcgacagggctgagagcgcattagaaaaagtattaaaagaacagggatatcgttttcggtttaatcggggagatggtgcattttatggaccgaaaattgatattcatataaaagatgcgctgaaccggagccatcaatgcgccactgtccaactggattttcaaatgccggaaaaatttgatttaacatatattgatgaaaaaaaccaaaaagtccgtcctgttgtcattcaccgggcggtattcggatctctcgacagatttctcggaatcattacagaacatttcgggggagcgttccctttatggcttgcaccggtacaggcaaaaatcatcccagtatcaaacaccgcacaccgggactgcgcagaacaggtgcacctgcaaatgaagaaagcgggtatccgggctgagctcgatcagcgcgatgaaaaactcggctataaaatcagagaagcacaaatgaaaaaaataccgtatattgcggttgtgggggatcaagagtgccgccatcaatctgtacatgtacggcaatacgggcgggaagacacatttgaagagaatgtgagtgattttatttcccggatcataagagaggcaaaacaaaaaatagagatttaataaaaacaacattgacatatcgtaaaatcacgatataataaagcgtatgaaacctattgatgtttttaaagcgttgtctaatgagtcacggcttgagattttacaatggctgaaagagccggaccgtcacttcgcaccgcatgatggcattgatatgaatgagatcggagtgtgtgtcagccagatcaccgataagcttcagatgacacagtcaacggcgtctcaatatctttccatccttcagcgggcgggccttatccaaacaaaacggattggcaaatacacctattataaaagagatgaagacgcgataaaggcgatggccgattattttcagcgcgaaatgtagggctgaatcctttagaagagggattcagtttctttttccgactacacatcgacatattgcgatttgtttctgtttgttcaactctttatatcgatatatcacaatatatctttatataaatcatcaatgaaggagtgtgtcaggtgcaaaatacctggaagatttacattttggcaattatcagttttttagtggggacgtctgaatatgtgatatcagggatgcttgataaaattgcaggttccttgggagttactgtggcagcggcagggcagctgattacgattttttcgcttgtttatgcaatcggaacgcctgtcatgatggcccttacagcaaaactggacagaaggaagctcatgatctatgctctggggctgtttgttatcgggaatatcatttctttccttgtgcagggattcggcttatttgcgggagcacgggtgattatggcgcttggagcaggaaccgtggtggtcaccgcgcttacgatcgcagcaaaaatcgctcccccgggaaaacaggcaagttctctcgcaaccgtcattatggggtttacggcggcgctcattatcggtgttccgatgggaagaactgtgtctgaagctttcggctggaaagtggttttcgccggaattgcggcaatcgggatcattgccatgcttattatacgtttcgcgttgcctgagataaaaggagataaaccggtgccgctcattcagcaattttctcttttgaagaaacgaaaggtggctgtcgggctggccattacgtttttttggctcggaggctattcggttgcgtatacgtacctttctccgtatttactgaacgtcactcatatcggcagcggaatactgagtacattgctgcttattttcggtattgcaagtcttgccggttctaaagcaggcggtttcagcgcagacaaatggggggcgcgtatgacattaaccggcggaatggcgcttcatgctatcatgctcatgttattgccgtttgtgacacattctgcttttggagcggcggcagtgcttattttttggtccttcgccgcctggtcatcaggacctgctcagcagtatcatttggcaacgatggagcctgaatcatcgggtgtattacttggcctcaaccagtctgtgatgcagctggctatggcagccggggcgggcatcgggggcattgttgtcactcatctgtctcttgcgtcagtgacatggatcggatcagcgggtgttgtcatcgcgatgtgcggcgtgctttcgcttgcgtcattaacgtctgaaaaaacctcaactgaatacagtgcagaataaacaaaagcctcatttctcagcttgagaaacgaggctttttgtctagttattttttcaagtttacgccgattgcggctccgtttcggcttgagtcggcaactccggtgaaggtgccgttttcacggtcgatcaggatgctttgcacattcccgatatcaaccgggctgctgccgaatttatgccccatttcgttcagttttgtgcgggcttcttccggcactcctttttcatatcgataggatgtcatgctgtttgtgtaaattctcggctcttcgaccgccgctttcagatccatgccatactcaactttgttcaggatcgtttgcaggacggaagaaataatcgttgctccgccgggggagccgacagtcaggacgggttcgttatttttgaataaaatagtcggagtcatgctgctgagcggacgtttattcggctgcacttcatttgcgccgccaggcaccgcatcgaagtctgttaactcattattcaacacaacgccgtatccgggaaccataatgccggaaccgaacagctgttcaattgttgtcgtataagatacgacattgccgaagcgatcagttaccgtgaagtgagtcgtttggccttcttgtttgtcagtcggctgctccacttgtttatagtttgcagaaccttcctgataggcccaaggatcgccggctttcggttttttattgactttatcaatatctatcagctgtctgcgggcattgatataatctggattcaagagacctttgagagggacgttgacgaattctgggtccccggcaaatgcggcgcggtcagcataagccaaatgcatcgtttctgcgagaagctgatatttttgccaagaacggatatcatattgagaaagcttaaaatcatccaagaggttcagcatttgcaacaggaaaacaccgcccgagcttggaggaggagcagttgcgatatgatagccctggtaatctccccagatcggttcgtcaattgtcacattgaagtttttaatgtctttttctgtcattgagccgccgaattcctgcactgtttccgcaagctttttggagaatgcaccgtcatagaatgcttttgtgcctttgtacttaatagctgtaaatgttttggctaagtctttttggatgagtgtgtctccttctttcagaggttctccgtccggaagaaacacgtcttttgcagcagtgtgtgataatttgtctttataatctgagatggcatcagctaaaaccgaatcaatcggaaagccttttgaggcaagtttaatggaaggggtgatgagttgtttcatggagcgtgtgccccatttgtcgagcgctttttcaagtccttttaatgttcccggaacaccgactgcagtccctttcgtaacgcgttcggagaaaggaatggctttgccgttttcgtcaaggaacatatccggcgttgcgcctgccggtgcgcgttcccggctgtcgataatggtggtgtctttcgtcttcgcatcataaaccatcataaatccgccgccgccgattcccgacatcataggttcagttacgtttaatgcgaattgaatggcaaccgcggcgtcaactgcattgccgccttttttcagcacgtcggcaccgatttgtgaagcgagaggatgggcggtggcaaccatgccgtctttgccgacatctacctgtttgtagtcgtcataggaaaacgggtgtttcttagcctgagcgtgataagggatgcttccggccgcgagcaaagtactgagcagaacgataaaacagagattcataaactttttctttttcatagtctgcctcctttgttttccgcttacaattatagagtaagtaaaatgtgctgttttcacaagtgacaaacggaatagtccggtgtgcaaaaagttggggtttctgtgtgaatgtaatcagtcgcaaataggctaaatgggaaaccggactgaaaaagctgtgaaacaagcataaagacaaaaaataagctacaataaacaaaacagaattcactcacatgacatatgaaaggaacgtgagccatgtatttaacgatcaaagagacagctgagtttaccagtcttcctgaagaatatgtgcacaatcttgttttgacgaataaaataagggccgtccatgacggacagcaatatttaatcaacaaggaacaatttcaaacccatctcgaacagctggaaaaatataaggaaatgattcaagagtttttaaatgagccgcttcctgaagacattgatgtaaaagatgaagactaggacacaatttcatattgtgtcttttttttgcattttttcggttgctcacaaaaaaacggatgctcagatttcattttaaggctgttgttttcattttttaatacctaaagtatcgatttgtttaaaagcttgtcatcggtctgaaaatgatgtttttgagtaatttgttgaaactgtgtatctgattcaccttatgtaacactatgtatattatgttacataagaccctttaccctttatcattcaacgggtttcggctataatagtaacataactctcaatatgttactttaccaattataaggggttttttaatgcatatcgtacagccgatccgaagtttggagaagatccaggaagtcaaacagtatttaatgaagaaaagtgatcgtgattattttttatttattttcggcatgaacagcgcactgcggatttctgatgttctgccgcttcgcgtgagggatgtcaggaacaaagatcatgtgtgggcaaccgaaagcaaaacgagaaagaaaagaaaaattctgatactggagtctttaaaggccgacatatacgcttatacaaaagacatgaaagaggatgactatttgtttaaatcgaaacgtacgaataagcccatatcccggattcaggcatacagaatattaaaggaagcggctgccgcttgcgggttggaggaaatcgggacgcatacgcttagaaagacgttcgggtatcatttttatcagaggacaaaagacattgctgaactgcagaggattttgaatcattcttctccgtctattacaatgcgttatatcggaatagatgaagatacgacgagagccgcctataaagtgttcggagggctgtagacttgaaaaaaacggccgccagcgttactataatagaagcaggctctagtagcacagcggatagtgcagcagtttcctaaactgcaggtcgggagttcgaatctctcctagagcgttttttgtatgagataggcgcagcttaataatgtcggtaaaacaaaacccccttgttatacaagggggttttgagttgaatattttgtgagaacctggtggaaatgatgtgaaaaaagcccgctgtaagcaagcgggctttttcttatatgacagcatcaaattgattgactttccaaacgttgttttcttttacgaatgttacatcgcgttttgctgacggagaaccgtcaagagtcggtacagtgaagcggtatgtttgagcgcttccttttttagaaagaagagtcatttttgcttttttccaattcaggaggttatctccgtcgccgacaggaacagccaatttgccgtcttttacagtgaagtggtaatctttgaaccctttgtcaatcgcttgctttgtaaaagcgggtgtcagatattttacggctttcgcttttgttccgaggtctttgcacataaatacatattgcagattttgatattcaaacggttcagatgtgcaatttgtgtttgatttaagagcaccgccgctcattgtgttccagaaatgttctctcgctgacagggccagctgaagtgcttgtttttgtgtaaggtcattaggtgcattttttgcggtcgccgcagtgcccaatgacagaatcaatgtaatagtagtgaggaataatagccattttttcatgatataatctctccttcaatcaatctctttctcttatgttacaaatgttacaataattacggtaagattacaataccttttcagaaatattttccggactttttatttttatggtttatttccatgtaagacgtgagaaaaagataaagagtttcattgaacaaaaggtttttacaagctgtctgctgaataataaaatggaagaaaatcaaaaaaggagtcctacatatggaagtacaagatcatttagaaacagcggaaggccgcggccagtctgtctggcgatcgatgtcactgtttttagtgccgctgcttttaagcaatgtattgcaatctgtcggccaattggtcggaatggtatttgtcggaaggtggctcggagtcgatgcgcttgccgccgtatcgtctttttttccgctgttttttctgctgatctcctttacgatcggaatcggttcgggaagttccattctgatcgggcaggcttacggcgcgaaaaacgaagagaggatgaaggcgattgtcggcactacactgacttttacctttatgatcggtgttgttctggcagttgtcggcagtgtgtttacgcttgatattctgcggctgatgggaacgccggaaaacgtaatagatgtcagtgtccgatatgcgcgcattttgttttgcgcaatgccgctgatgtttttatattttgcgtatacgacatttttacgcggaacgggagattcaaagactccgttttatacgttaatcgtcagtacagtcataaacatcgggcttttgcccttattgattctcgggcttttcggacttccgaagttcggcatttacggttcggcgtatgcaaccgtaatttcaaacatcgtgacatttatcgtactcatggtttatttgcggaaaaggaaacatccattggcatttgaccggactgcgctccgttctcttaaaatggacaaaaagctgcttgcgcttttactccgtctcggtattccgtcgagcatcaatatgattctcgtttcactttctgaaattgcggtcatttcatttgtcaatcattacggatcaaacgcgacggctgcttacggggtcgtcaaccaagtggcgagttatgtgcagatgccggcggtaagcctcggtatcgccgtttcaatttttgccgcccaatccattggcgccaatcaattcggccggctgaagcaggtcatcaaagtcggcatcggcctgaattatttgatcggcggggttttgattgtgctgatttataccttctcccggcagatactggctttgtttttaacagatcaggatacactccacattgcccgcaatctgattatgattaccctttggagctatctgattttcggtcacgctcagattgtttcagcaacaatgcgggcgagcggtacggtgttatggccgacgattatcagcatttttgcgatttggggaattgaagtgcctgtggcctttattctttctcattatacgaatctcggcattctaggcatttgggtcggttatccggcggcttttgtcgtcagcctgctgctgcaatacggatattaccggtttgtatggaagaaaaaacagattacccggctgattcaataaggttttaccgcacatcgctcagttcatacgggcgatgtttttttagagaaggaaaatgagtttagaaaatggaattcctatacatgctagaaaacaaggaaagggcaggtgcttatgacgattgaacatacgacttatttaggggtttcagccattaaagcggagactgatcaggctgaatgcatcattgtgccggagtggggatcaaatgtcatatcgcttcgggataaaagaaccggtatgcggcttcttagagaaccggaaactgcggagcaattccgcgcaaaaccgatgctgtacggcattcccgttttattcccgccgaaccggattacggatgggacgtttcgttttgacggccgcgcgtatcaatttgagataaacgaagaggataaacataatcatattcacggctttcttcacaatcagcattggaaagcggcggcagcgaaagaagagggggatggaatgaaagtcgaaacagaaattgatctttcaaagattccccgtgttcacaaacaatttccgcacgatgtcattgtccggatgacctatacattaaaagacaatgtgtttacgcagcgggcgctgattatcaacaagggaacggaggcttttccttgggggctcggctatcattcaacttttgttttcaatgaagagcgatcccgtctatttttgacggctgaccgcatgtgggaattaaatgaacgtttcgtgccgacgggccgtttattggatgtgcctgataaagaagcgttccgtcatgggatgtctttgaaaaataaacagtttgacgatgtttttctttcttccggacggaacggcggcaataacgaagctgttatttatcatccggatgagaaattatccgttttgtatcaggcagacacgtctttcaagcattgggtggtatataacggtgacggaaagcaggggtttgtcagtcttgagccttatacttccgttacagatgcatttaatctgaatcagcctgcatcactgacagggcttcagattctgaaaccgggcgaagaagcggctgcgtcatccaggatcaccattttgcatgacgaagaataggaaagaggcgggataacattgaaaacatatgtgaaacgcttgagcgcggtgattctgcttttgatcattgccgcagttccttatattgatgatgcggctaaggcggctgaacaaaaaaatactttgcaaaaagagctggaacacattctggatgaagaacctgctttaaagggagcttcagcgggcgtcagtgtccggtcagcaaaaacaggggaggtgctgttcggcagccgggaagatatgcggcttaggcctgcatcactgatgaagctgctgacggcatctgcggcgctttccgttctcggagaagattacacctttaagacagaagtacgggcagacggcgccgtgaaaggaaaacagctgcgcggaaacctttatctcaggggaaaaggcgatccgaccctattggcttctgattttgagaagatggctaaacaggtcaaagccagaggcatccatgtcattaaaggagatctggtcggggatgactcgtggtatgacgataccaggtattcagttgatcttccgtggagcgatgaaggccaatattatggcgcgcaagtatcagctcttaccgcttccccaaatgaggattatgataccggaacggtgattgcggaaatcagcccggcaaaacagcccggtaaaaagccgcgcatttcgatttctccccatacggacgtcgttcgtgtgaaaaatgaagtgaaaaccgtcgcttctgatgaaaagaaagaattgacggttgaacgggagcacggtggcaatgtgattacgataaagggaactatacctgccggctcggcacaggcaaaagaatgggcggcggtgtgggatccgtcgtcctatgctttagatttatggaaacaagcgcttactaaacagggtataactgtaaaagggaaaatcagaacagggcgaatgccgcaccgcacccagcttgtcacatcacggacatccatgcctctttcagaattattgatcccgtttatgaaactgagcaacaacgggcacgccgaaattctgatcaaggaaatgggaaaagtgaaaaaaggagagggaagctgggaaaagggctcggacgtgatgaaatcggagctcaaatcgttcgggctgaatccggatgaattgattgcaagagacggatccggcgtttctcatgttaacggcgtatccgccggccaaatcggagagcttttgtatgcggttcagaaagaaaagtggtacccggctttccttcgttcgctccctgtcgcgggcgcaagtgacagaatgacgggaggaaccctccggaatcggctgaagggcaccccggcggagggcaaaatcaaagcgaaaaccgggtcattaacgtctgtcagttcgattgccggctatgcagacacaaaaacaggagatacgcttattttttccgtgcttcaaaacgggctgcttgacgaagatgacggaaaagacattgaagacaaaatcgcagtcgtgctggcaaatcaataagaagggccgaatccttagaggattcggcttttttgatgtctgtaaaacattatattgcgattatgaatcaatcttttcaaaaagtaatacggcaatatacttcctttttttacatggcactgatttttcatttttaaacgtaaaacttcttttcagaaggcaaaacctttttaaaagtgcaattaattatacattttattccttattatagtgtttaagaaccagtttacagtgtgcatacataccgttttacatggtataaagattatagaaatgaataaatgaagtgaggaatatatactatattctaaaaaatgttagagaaaatttaattttttattgtgatttctaaaatatgttttaaaataatgctatatggatgatttagtcatatgctgtcgaattttaattgtaattatttcactttcttatcctcttaaattgaaatggagggattccattgaagaacactgtttattctttaactcacgcccaaagaagagtctggtttacagagctgctcgagccgggcacaagtatctgcaatctcgcggcgtgcgtcaaattcagggggaatatcgactttgacgtattgcgccgtgctttagatttctctatcttgcaaaatgattcgctcaggtttcaactgacggaaggggacggctcagaaccccagctgtatctggccgggcatcggccgatttctttagagaccgttgattttactcatattgatcaatcagagcgggaggcatggattgacaaacagacgcgtgttccgttcaagctgtttcattcaccgctgtatcaatttactctgcttgtcatgtcagacgaagaagtttggctttattcaaaatttcaccatattattatggacggcatctcgctcaatctgcttggcaatcagctcattgaaatctaccaaaaaatcatgcgaagcgaggatttggccgaacaccaaagcccttcctatctcagctacatggaaaaagaacagcaatacttacagtcttcccgttttcaaaaagaccgttcattttggactgaaacataccgaaccgttccggaacacctttcactggcggaacgaacctctcatcttagacaaagcactgcggcttcaagagatacaatcactctttcccactccttagaacaatcaatccggcgtttttgcaaagatcataatgtcagcatcatctctctgtttatggcttcgttatacatatgcatcagccgtctgacggctaaaaaggatattgccatcggtacttattacggaaaccggggctccaggctcgaaaaggatatgctcggcatgttcgtcagcacactgccgatcagaatgacggcagatcctgatgcggagttcctgtcctttgtccgcagcgtaggaaaagagcagctgtctgttatgcggcaccagaaatatccttacaatctttttgtcaatgaattaaggcagattcatcacgacctgcaaaatatcatcgggatttcgatgcaataccagcctctcgcgtggcgtcaggcagaaggtttcgattatgaaacggcgatgtttttcagcgggcatacggcaaatgagctgtccattttaattaaggagcggacagatacgggattgattgagctgaattttgattatcaatccgctttatttactaaaacatcgattaaacgaattcaaactcatttgctgacgatcgttgaaaatgccgttagaaatccaaaccggctgattcggcatattgatatggcggatgaaaaagaaaagaaacgggtgttaactgcgtttaaccgtacagaaacggctgaaccgccggccccgacgcttcacgggctgtttacccgccgcgccgagctttcgccgcatcgtccggcgctccgttttccgggcggtatgctgacgtacgccgagcttgatcagtacacggacaggctcgccgttcggctccgccaaaaaggcatccgcaaagaaagcatggtcggcgtactcgctgaacgctcgccggagatggtggtttcagtgcttgccgtgttaaaagcgggcggcgcctacgtgccgcttgacccggagtatcctgaggacaggctgcgctatatgctcgatgactgcggcgcttgtcttctgcttgcacagccgggattatccgtttccggtttttccggagaaacgctagaagtgtctctttctgctctgacaggcgagacggagacaggggctgtctctgaagaagcggatagcgcttcgctcgcttatatcatttatacgtccggttcgacgggaacaccgaagggagtggctgttgaacaccgtcaggccgccgcctttttatcagggatgcaagggcagtttccgttaacggaagaggatgttatcgtgctgaaatcatccttttcattcgacgcctctatctggcaattgttttggtggacgatgtcaggcgcctccgtgtatctgcttcctgccggctgggagaaagatcctgtgcggatgattgaagcatttgcctcagaaaaggtgacgaccgcgcattttattccggcaatggtcaacagctttttagacgcgctggaaacggagcctgaggaaacaagaacacgcctcggcagaacactgacacgcgtgtttgccggaggcgaagctctttcaccgcttacggctgcccggtttgccgatctgttgccggagacgatgcttattcacggctatggaccgacggaagcgacggttgatgcggcgttttacgtctgtgaccgaaaacgggacagcggacggacaaggcttccgatcggaaaacccgttccgggtgcccgtctgtatgtattagatagcggaggaaccatccagcctgcgggcgtggcaggagagctgtacatcgctgggacaggggtggcccgcggctatctgaaccgacctgagctgacggaggagcgttttctcgatgatccgttttatccgggagaacgcatgtatcagacaggcgatatcgcacgctggacagaagacggccttgtcgaatggctcggccgttcagacggacaggtgaaagtccgcggctaccggattgaaccgggggaaatcgaagcggcgatccggcgcatcgacggcattcgtgaggcggcggtcaccgcccggaccgaacacggcgaaaccgcgctttacgcctatatcgaaggacgggaaagcgatgacgtgcgggcggagcttgcgacacgccttccggcttacatgatgccggctcagtttatagagatgaccgagtggccggtcacgccgagcggaaagcttgaccgccgcgcgctgccggctcccggcggagcggcagacagacgggcgtacaccgccccgcggaacgtcacggaaatgaagctttgcggtctttgggaagaggtgctgaaaaacggccccgtcggcatccgagatcacttttttgagcggggcggccattcgttaaaagcgacggctctcgtctcccgcattgccaaagagttcggtgttcaggtgccgttacaagacatcttcgcccggccgacggtggaagaactcgcttcggttattcaggacttggaagagagcccgtatgaagcgattcagcctgcgcaaaaacaggacacctatccggtgtcttcggcgcagaaacggatgtatgtgctccaacagcttgaagacggcggtgtcggctacaatatgccggctgtgctggaactgacgggcccgcttgaccgcagccggctggaggagacgttccggcagcttgtggagcggcacgagtcgctcagaacgtcctttgaaacggggcctgacggcgaaccggtgcagcgcatccatgacagcgtaccgtttcagctcgatgaggccgagtcagctgacgcattcgtccggccgttttgtctggaggaagcgccgctcttccgtgcggccctcgtgaaagaatccgacgaacaccatcttttattaacggat

SEQ ID NO: 82 - DNA, 2143 bp, Bacillus amyloliquefaciens
gtgtcagaccagacatgactgaatatattctttagctagagatcctattattgggattacaccaatttacacattgttgctacataatatcagcaataagaggtggttatatttttgctaaatataaagattatatcaacttaatttaaatcataataggtaatttttaatatttaagggaatattaaagtgattaattattgtgtaaataattcacctataatactatatataagtaaatatttattaaaaggagtgataatggtgtggaccatttgttttaaagaatttaaaagtctgtttaagagcgtgaaatccattataacgatagcaattctatttgcagtttcgtatttagttgctgatttaatggagagtgtttctaaaatcgaagatttaggattggattcaaatggatatgcgatggggatatttagtattgtgtttcttatcggtcttttattaatttcagggctatcacacgatattataaatagagaaattaatatgaggactatgcggtttttagtaactaaatcatcaagattgaaaattttgttggggaaattttttggaatatggctattttggctgttttgtattatagcctcatacatattaatctcttttgtatcaaaagaatttttttggtcaggtgtcgcggaatgtatgacgtttataactgttggaatatctttcacgatacttttttctgtggttattccaaaacccggagtatcaatgttttttagtattatattttctttggtttttcctgcgataagtctgtgggctctcttctcatcgaatggttggattagttggtttaagtatcttacacctttttattactcatatttaggcggatactttattttaataaatcttgtttacgccaccatcatattatatgtcgcaatagttctatttaaaaggagagatttgtaatgaccgctatcgaaattaatgatctaactaaagtgtatggttcaaaaactgtagtcaataaagtcagtcttcaggtagaacgtggggagatatatggattcttggggagaaatggagccggaaaatcaacctttataaacatgattacgggaataattcgaccgacctctggaagttttaaattgcttaatgaagaatcccttgacaaaatcaaaaatcgtataggtgtacttccggactattctactttgtatgactctatgtcagctgttgaccatctaaagtatttctcaaaaattaatggaagaaaaatttcaactccccaatgtgagaatgttttggaaagagtaggattgatcaaagatgcaaataaaaaagtaggtaagtactcattcgggatgaaaaagaaacttggaattgcgcaatcaattgtacatgatcctgacttaattttcttggatgaacctacatcaggggttgatgcagaatctgcattacttcttcaaagtttaatcgtaagcttacaagaagaaggtaaaactatttttatgacatctcacaatttaaacgaaattgaaaaaatctgttcaaagattgctattatgaaaaaaggaagtatcttcaatgaaggtactttaattgagttgaaaaagcaatatacatctaatattaaagtgaaatttaaacactctgtaaaagaagaaaatcttaatgatattaaagatgcagtgggcaactttggatccgatattttcattaagaagaatgaattctcactttctgtaagttctgaagacaaaattccagctattattaggatattaactgaaaggaatatcgatatatatagagtaatagttgaagagccaagccttgaggaaatattcatgggataattaaaataagtcccccgtttttataaaagcgggggttactttccaggttgcaacaataattttttataataagggactaacaaaaaaatttctttatataatgaaaaattaaatttatatcaggagtttttgtttgaaagctttaacaataatccccactctggtctgcgcatttagtttcttggatatccgagctatataatactcgatcatcctttgagaataatttagtttatctgcaatttgtttattgggcatctcacatgcaattaacttaattatttcttgttcaatttcag

SEQ ID NO: 83 - DNA, 808 bp, Bacillus amyloliquefaciens
ccttcaattaaagcgagagaggtcgacttaccggagccgctcctgccgagcagcgccattttttcaccttggcggagagtgaaggaaaaacggtcaagcacatgactgtgctgatcataagaaaacgtcacgttatcaaatgtaagtgtcacatccgatacatccagtttctcatccgtctgcttcacctcaccacttcgcagctccggagccgccttactcattcttttgatggaatcctgataagaaggcacttccgtcagcgcatccgaaaggggcagaaacgcctccgtcaatggaaatacgacaagcacaaaggccgcgatcatcgtgttggcgatgctgccgtccgcatactgacccgccgtccagaacagcatgatcaatatgaagccgccgacaagacattgcgcggcgagatcacgccatctcgtaaaccgctgacgtttgctttcaaggtcaaaccacgccttctctttctcttcatatgaggaaataaaggccgcctggcgtcccgagaacatccagtcgctcacgccgagcacggcatctgtcagccggctgtagagcgtattccggccgcttttcagcctcatgtttttcgctctcgtcacaagaagcgacacaaccggaaacaatacaaccaatataaacaggtaaatcgccgcaaaagcggcaaacggccaggaaaaaaagccgagtccgataacggaggccgcatacagcagcaaagcggaaaccgccgggaaaatcgtttttaaaaacgcatcctgcaaatgctcaatatcctcagccaaaatgccgagca

SEQ ID NO: 84 - DNA, 12584 bp, Bacillus amyloliquefaciens
aaatcagcccgcgggctgatttgtgagaaacgaaaagacagggcaacgcagcctctgtcttttttaaatgatgtaaaccttttcataatacgagaaaaagaaaggctgacggtttagtacacccagtcggccattaatttttgatacggtacaagctcttcctgtttaaagaaaatgtgaatttccctctcagcgctttctaaggagtctgaaccgtgaatgatatttttgccgacaaacatgccgtagtcaccgcggattgtgcccggcagtgcatctttcgggttcgtttttccgatcagctgtcttgtgatctctactacattttccccttcccataccattgcaaatacgggccctgatgtaatgaattccacaagctcgccgaaaaacggcttccctttatgttcagcataatggttttcagccatctgttctgaaacttgcattagcttggctcctgccaattgtaagcccttacgctcaaatctggataaaatctctccgatcagctggcgctgtacgccgtccggttttaccatgataaaagttttttccataagattctccaccccatcattatgtataggctttcaagttgcacaccgaaatcgtaacatctttctgacaattaatcaatccagggcggagaatgttcacatcttgttcgtaaaaggaatttaaaatttccgtttgccgatatatttggcgatggcggccaatgatgagcgcgcacgtcctctcggcagtgtattcagtttttcaaacgctttttttaagtacctgtcactgacggccattgatttttcaatcgcgtctgtgcgtttaatattttcaataatgggggcgagctgctcctgtgttgtttcactgttaattaatttcagctgatttttcaattcaggctgacggagtgcatacaaaacgggcagagtgacatttccttgcagcagatcccctccgaccggttttcccagttcctcttccgttgaagtgaaatcaagaatgtcgtcaataatctgataggacatgcccacgtaataaccgaaccaatataatgccttgtgaatcttctcatcagctcccgaagcgatggcgccgagctgacagctgacggcaatgagaagagccgttttccgtttgatgcggcgcaaataggttctgaggttttgctccatattgtatttatctctgatctgttcaatttctccgaggcatacttctacgatggttttggacaggatccggtgggctttcggctcatccaatctcgtcatcatctcaagtgagcccgcaagcatataatcaccggtatacatggcgatgcggttgtcccacttggctttgatggtcggttttcccctccgcagctcggcgtcatcaatgacgtcgtcatgcacgagggacgccatatgaatcatttccagcgtcaccgcaacatattttattttattaatgtcatagtcgccgaacatgccggaaagcaatacgaaaacagggcggatccgcttgccgcccgcctggagcaggtggagcccggcttcactcagcaagggatagtctgaccgcaccgtttgctcaagctccctttcgatcacatcaatatcgtcatttaaaaaagaataggccattttaaatttcatatcattcacccaaacatctgtatattcatcatttccaaccgatatgcgtagcggccactccgccggtaaacgaatggtatttgacattcgtcaggcccgcttcttcaaacagacgcgcaagttctttcataccgggaaattctcttgccgattcttgaagccaagaatattctttatagctcttcgcaaacatttttccgaagaaaggcatgatgtatttaaaataaagaaaatatgcctgtctgaatccgaacatttccggctgggatgtttccagacatacgacctgcccgcccggtttgacgacccgccgcatttctttcagcacggtcagatagtcgggaacgtttcgcagcccgaagccgatggtgacaaaatcaaaagaatcatcagcgaaaggaagctccatcgcatttccgtgcaaaagctcaatttggctgtaaccgccctctttcacttttttctcaccgatgctcagcatatttttgctgaaatccagtcctttgatttcgccgctttttccggccgcttctgcgagggcaatcgtccagtcagccgttccgcagcagacatcaagcgcttttgcgccttcttttacattcatgatctgcatcgttttgtcgcgccactttttatgctgctgaaaactgataacagagttcatttggtcataatttttatagattttttcaaacacgccgtgtacgcgctgttcttttgactcctgcatgttgattacccttcttccactttctgatgatatgttttgtcctggctgatcgctttaagccggttcagcatgaggttttggattggtgaattgagcggcagcagcgtttcaatgctttgctttgcctttcggaagctatcttccattatgtcagcctttgatttccctgactttacaatattgccgatgacatcgagaaatatagcattgccgttcatcagccgcttatatacaaaaaaatcactcgccagctctttccagcgcggaagattaaagtggtctgacactctgtgaaacagggccgcttccacaatcgccatgctttcgatcaattgattcaagtcattgacagaccgatcgtacagacggattttatgctcattgatttctttaattgccgtagcgagcgtccgaatcatatagatatccttcatttcagataaaagcgaataatacagtccgctgaaatagtcgccggcaagcacggtgagctgccggtttttattttcgtctcgctttaacgctctggctgttgtcacttcatcgtgggtatcaagggcgctttggacaagcatcgcagttactatgtaattttctctgtcgttgttcttaatgtccgcctcttcaaacaaagcgtgaaaaagaagaagcttatcctcatcgattttaggcgcggaaatatgtttcgctaaataaggatgagacagcttttgttttaatttcgtatttagattcgctaaagttccgtagatgtcttgcaaaaatatcacccttgtccccaaattcacatttattctaatatgtatgagatttactcgtcattattatacgcaggtatcattatagcataaaaaaaagaaattggctgtattctcccgccgtttgcgggcatttggcaaaagcgggaaacagccggcttattttttttcgctgttcatttctccgtaagcggtctggatgagggcgttgcctctcactttgatggcagaggtatgctcagtaaactgagcgataatcacttcgcctttgtccagtttttcggaatggtgaaatttcgtatccgttcctctcgttaaaccgatgacgttcacgccgtcctcgaccgctttaatgacgacaaaatcacttgaatgctttgaattcatatctgcaccctctatcattattaatccgcacgtttaatatgttctaacacttcggaacgcgccgctgcgtcatctttaaaaatacctcttacagcggaagtcactgtttttgcgcccggttttcttacgcccctcatcgtcatgcacatatgctcagcttcgacgacaaccatgacgccgtggggatctaaggtctctacgatgctttctgcaatcgttgaagtgatgcgctcctgcagctgcgggcgttttgagacggcttccaccgcccgcgccaatttactcaggcccgtcactttgccgccgcgcggaatgtaggcaatatgcgcttttccgtaaaaaggaacaaggtgatgttcacacatggaatgaaacgcgatatcttttacaagaacaagctcctcatggtcttctccgaaaacggttttaaagtgttctttcgggtcttcatttaatcccgagaatacttccgcgtacatttttgccacgcgtttcggcgtatctaaaagcccttcccggtccgggtcttctccaatcgcctctaaaatctggcgaaccgcctgttcaatctgttctttattaacttctttcattgtctgtgtcctccaccattgaatacatttaatttcgattctagcacatttgccgcgccaaaagcaaaacgaaagtcctgcccggtgaccgaggctgcttaaatatgaaaagcccctttatcaaggggcttttctgtgaagaaacaaagtgtatgtatcagatgcatacacgatctatattcacaattattttcctgcaacagcgtctttaagagctttacctggtttgaaagcaggtaccttgcttgcagggatttcgatttcttcacctgtttgcgggttacgtcctttacgtgcagagcgctcgcgcacctcaaagttaccgaaaccgatcagttggattttatcaccgtttttaagtgcatctaaaatcgtatcaaaaacagaatcaactgcttttgtagcgtcttttttagacaattcgcttgcttcagcaaccgcattgattagttctgtcttgttcatgcctttcacctcctcccaaaagggtatcaaatcagcagtttattatcatttcttcacagttcagcctgattctaaacctgtctgataaaaaatcaaagcagggaagaacagacaagtaaacggcttttcaaaagaaaacagacactttgaggaatgtttgtccaacaaagtgaagattttctgtatgtagagtaacacatataaaaagccatatcaagcattttaaagcctcaatcccttgctcgtcaaggttttcacgtgttttaccgaacaaatattcctttttttgcttttttcctcctaatccttgattgatttccagtatctaaaaagaagaaaaaaagaccccccgtttcaggaagaggtccttcagcttacaaaataatggcgatcaggccgcctgagccttcgttaataattctctccagcgtttctttcagtttatatctcgcattttccggcatgagtgacagttttgcggagattccttctcttacgatagagctcaatgatctgccgaaaatatcggagttccagatagaaagcggatcatcttcaaagtcctgcattaagtagcggacaagttcttcactttgtttttccgtcccgatgatcggcgcgaattcactttccacatccactttgatcatatgaatggacggagcgaccgctttgagccttactccgaaccttgatccctgtctgatgatttccggttcatcaaggctcatatcggctaaggccggggcggcaatgccgtagccggtctgtttcaccattttcagcgcatctgatacctgatcatattcttttttcgcgtgggcgaagtcctgcattaattcaagcaggtggtctttcccgcggatttcaacaccgacaacttcttttaaaatctggtcatataaatgatccggcgcatacaaatcaatttctgcgacaccctggccaagttcgattccggccagaccggcgctttcaataaactcaaattcactgaagtggccgacaacccggtcgacatcgcgcaggcgtttaatatcttttacggtttctttcactgattcctggtagctctctctgagccagtgattttctttcagcaccatgacccagctcggaaggttgacattgacttccagcacagggaactcgtaaagcgcttctctgaggacgcttaacacatctgtttcccgcatgctttcaacactcatggccaggacgggaatatcatatttcgcgcttaattcagctctgagcgcttctgtttccgggtggtacggttttaccgagttgatgaccataataaacggtttgccgacttccttcagctcgtcgatgactctttcttccgcttccacgtaatcgccccgcgcgatatcgccgattgagccgtctgtcgtaatgacgaccccgattgtggagtgttcctggatgacttttctcgtaccgatttccgctgcctcatgaaagggaatcggttcttcgtaccaaggtgtattgatcattctcggtccgttttcatcctcatatcccttcgccccgggaaccgtatatcccacacaatccacaagacggatgttgacatcaagtccttctgcgacatgaacggacatggcttgattcgggacaaattttggttctgtggtcattatcgtttttcctgctgcgctttgcggaagctcatcctgcgcccgcgctcgatcggcctcattgctgatattcgggagcaccacgagctccataaattttttaatgaatgtagatttccctgtacggacagcgccaacgactcctaagtatatatcgccccctgttcgttcagcgatatccttgaaaatatcgaccttttccaagtgatcccctcccggacttcctatccttatcatttttcattcaccattctccaatcaaatacaggacactatatgtgtatgacgttgtcctatttcaatatgacatctttagaaaattttcaggcagtcttttctatcaaaatcaaaaaaacctttctccctatttgtatgcgcgggaaaaaggttcattcctgtttcgtttgactttctaaaaaaacgggttcctgtttttcatttacggtgtaagtgactgaaaaggccgggacgaaaggagtctctttccataaaatatcctgaatttccgcgcccggtttgattttctttttgttttccttcaggcagcgggcgagatcgacgcgatagtcggcatagatttctccgtcagcgccgattaaaagcggcagagacgtgcctgaaaccggacttttgactgaaggagagtctttcatgccgagcttttttttatttaaagtgaacagcccttttgaaacggcgtcctcatagggaggatatgtatgcttttcctgatacattttgacacgcagcttcatgtcacggattgcttccgccatttggagatcgaccagcttgacggtcggcttatgttccacatcgacaagcacgtattggtacattcccccgctttcataagctgaggccggcggctcctctatgtatctaggcgcgagccgcttaaaatctatcggatatttttgatagagcggtgttttcatatcttttgtctgaatcggcagaagtccgccgttcgcctttttaaattcatccactgccgcttgcacctgctgaagctgatgtttgtaagatactttattttcagtttttttcgcttcagggtacagacagccggacagcagaagcaccgccattgccgttatgacggccatttttaacttatgcattccgcgccccctttcggctttattcattgacaggcccgctgaaaacgaccattagcacgatcaatcccgagatgaccatgcaggcataagcgagtgaagaaaccgctgcttttatcagtttgtttttcactttgtacctgctgacataaatagaggccaccgcaacaaacattaatcccatagcaccaagcgcaaaccacattttcatcaatgccacactcacgttcgtgcccccccgtcccatcattgtaagcgttatatttcattttaatatacaaatgttgaaaagatcaacaggttttccatctattgaaaaaacaaaaaaactgaagcaaagagggggactttgcttcagtcaagttgactatattcacctgtacgtctgagatacactctcttggacttcgatgctatagtatgcgtagatgcgtacgtctgcatcctcttctgcctaaatcagcaaatgttttaagcgatttcagccggagagttctgcgttttggactttcgtcacttcagaatatgctgacggcatggtattgtcacttcacccggttttcgaatgtgttgaccaagtcttccatctcatgggttttcactctggccattaaggattctacggctgtttctaccttctgcccgttaaataatacttggtgaagcgcctctgtgatcggcattttcacttggtatttttgagacagctgatacgcagctttcgtcgtccgcacgccttcaacaaccatccccatcttatccaggacagcttccagcttgtatcctttgccgagcaggttgccggcgcgccagtttcgggaatgaacgcttgtacacgtcacgattaaatcgcctacgccggtcaggccggaaaaggtgagcggatttccgcccatctttgtgccgagtctggcaatttcagcaagacctcgggtgattaaggccgcttttgcattatctccgtatcccaatccgtctgtaatccccgctgcaagagcgatgatattctttaacgctccccctatttcaacaccgatcatatccggattggtatagacgcgaaaatgctggttcatgaataaatcctgaaccgcttctgcagccttgatattttttgaagatgatgtaacagtcgtcgggtgtcttaatccgacttcctcagcgtggctcggccctgaaagcacgacgatgtcttttctgtactcctcaggcagctcctcttccattaattctgaaatgcggagaagcgaatccggctcaattcccttgctgacatgaacaaaaatcgattgtttcgggatgtacggcagagcctttttcagcacttcccgaatggcttttgtcgggactgccacaatgatgaagtcagctccttttaaagcctcgcttaaatcagctgtaccgatgatagaacttgatagctccacccccggcagataatctttgttttcatgcagttcgttgatttgatcgatcaattcggcacgatgtccccacatcatgacttgatgtccgttatcagccagcactaaagaaagtgcagtgccccagcttcccgctccaagcattgccacttttttcatctctgtatcacacctttttattttcttgctcttgcaaatattttaattggcgtaccttcaaatccgaaagcgtcccggattcggttttctaaaaagcgttcataagaaaaatgcatcagctccggatcgttgacaaaaacaacgaagctcggcggcttaacagcgacttgagtcgcatagtaaattttcagacgggagccgttgtgcgtcggagtcggattcatggcgaccgcatccatgatgacatcatttaggacatttgtctgcacgcggagagagtggttttcactcgctttaataatcgcaggcatgagtgtatgaatccgctttgtcgtcagtgccgacataaacagcaccggcgcataatcgagaaattggaaatgttcctgaatattctgttcaaattctttcatcgtgcgctcgtctttatcaacagcatcccatttgtttacgataatgacgacggctttcccggcttcatgggcgtatccggcgatccgcttgtcctgctcaaggatgccttcttctgcattcagcacaacgccgacgacgtctgagcggtcaatggcttttaacgcccgcagcacactgtatttttctgttgtttcatatactttacccttttttctcattcccgccgtgtcaacgattacaaattcctgctgattgtaggtgaacgccgtatccactgcgtctctggtcgttccggctacgttgctcacgataacccgctcttcgccgagcatcgcattgacaagggatgattttccgacattcgggcggccgatcaggcagaattgaacgacatcatcactgtacttcgtctccggaatgtttttaaaatgctcagcacaagcatcgagcaaatctcccaatcctaagccgtgtgtgcccgaaatcggatacggttctccaaagccgagcgcataaaagtcatagatgttcgctctcatttcggtattatctaatttattaacggctaatacgaccggttttttcgtccggtacagtatttttgccacctcttcatccgcagacgtcacaccttcgcggccgttcaccataaagatgatcacatcagcctcgtccatggcgatttcagcctgctggcggatctgtgtcagaaacggttcatctccgatatcaattccgcccgtatcaatcaggttaaaatcataattcagccattccgccgaactgtatatccggtcccgcgtcactccgggggtatcttctactattgaaattctttcacccgcaatccggttaaagattgtggattttcccacattcggtcttccgacaatggctacgacaggtttacccatagtacccttcctttcaatccagccgcttacattttcacaaaaaattgttcaaccggttattaaaaatcatcttcgctatgaaaagaacccttcaaacagaagggcttaactcatttattatatcagttttcactgagatcacaatgtattcttcaaaatgtttcgcattcatgtaacagtctccgtctgttttcaagacattttcgtcgctcctttgccctgctttttgcttttttggctgatgcgcgccgcaagctgttcatatgtagtcagcccgacgagaagaatcactcccgccgaacagcctgaaagccatttataatccccgacggctgccgcacccgcaatattgcggatgaccgcagcatacaatagctccccctggcacatgccgagaacaaaaagacaaagcctctcagggaaccgcccctcaacagaaagcgtaataacggtaagcagtataaccgccgcccattcaggttttatgataaaccaaacaggatcatataatgcaaaaagaaaaataaagccgtacgccgcagccgccgtcagatgaatcacaatattacggagccgtttatgcataccgaggcttcccgcataaacaaatgccgcagcaaaaaacatgacatatgccgcgttcagcgtaaaataagccgtaatctgatgtatgcttgccatcatattagtcaaaataaagactgatacgtaaaaacggctttttgttttggcaaaaataaaagtcgcaagtatccataaaaaccacattgaccagtaataataaaacggttccataatcgctcctcctctgatcagtatggagcgggaacgcattttttaaaccaattatacctgaaaggagcggataaggatgggaaaagacagacaggagaaaaaactgaaagcctcccgccgggtggaatctgatcgcgatgattcgattcaccataaaggagcgacaagccttgagcaaaacggggaattccgaaaaagaaaatcgtaaaaaacagaaaaaggcatgcgggtccgcatgccttttaacgtctgctgaaacgggacgtgtcaattccccgttcagaaagccagtgatgtgtgtcaccttttatgaccaaaggcgccttttgcaattgggaaaccgattggcatccgagggcggtcataatcattttcagctcttgcaaaagcgccgtcatctcgtcaaacaggccctcttctcctttagaggtgagagctttcaggaaaatgcccgccattcccgcgctggaagcaccgagggcaatcgatttggcgacatccagggcactttgcagcccgccggatgcgataattgattgatcagcggagagcgaatggatttccgctaagcttgcagcagtggaaattccccacgtattaaaaaattgaagcgccttctctctgcgcatattttcgatcttagagaaatttgtaccgccgtatccgccggcatcaactgctgctgcgccagcatcaaataactgccgtgccgattccctgctcattccgaagccgacttctttgacaaaaacgggcactcccgcttccgccgcaatccgctcaatacggccgagagcgccagtaaagcttctgtcaccctctggcatgacgatctcctgaatcacatttaaatgtatctggagggcatctgcttgaatcatatcaactgcccttttcgcctgctcagcatccgcctcgctgcctaaattggcaaatatcagcccgtccggattctcttttctgacgatctcgtaagaacaccgttcggagggatcttttaaagctgacatttgcgaaccgacagccagcggcatgccggctttgtgcgcggctcttgccagcgatctgttaatttcgtatgtaagctgtccgccgccgcctgtcatcgcattgataaaaatcggcgaactgcttgtgagtccgccgattttcgttgatatatccactttttccaatgctaggttcggtaggctgacatgaacaaacgtaatatcatcaagccccgtttcccggttttggccggtagacagcgcatgatttatatgttctctttttcgttctgctcgtgtcacgttttatcaccaatttattttaatttattaagcttgtctccgattaaatcgccaagctggaagccggtgctcggctcttctttcgcctggtattggcggaagtcctcttgatcggctttcggcgcttcttcaagctcacgcatgcttaaggaaatgcgctcttcgctttcgttcacgtcaagcactttcactttaacagtctgtccttcttcaagcacttcatgcggcgttccgatatgt

SEQ ID NO: 85 - DNA, 212 bp, Bacillus amyloliquefaciens
catcttttattaacggatatgcatcatattatttctgacggtgtgtccgtcaacaccttgataaaagaattcggcgagctgtacgcaggccgttcgcttgcgccgatgcgccttcaatataaagactatgccgtctggcagcggtcgtttcaggagaaagaagggtaccagaaacaggaagcgtattggctgaagcggctagaaggagagct

SEQ ID NO: 86 - DNA, 474 bp, Bacillus amyloliquefaciens
gaaaatcggaattatcggggaaagcggtgcgggaaaatcgacactcattgatgtgctgggcggctttttagagcctgcgtccggtgagatcaaggtaaacggtgaatcccgctcgcatctgcagtcggacggctggcagaagcagctgctctatattccgcagcacccgtacatttttgatgacacgcttttgaataatatccggttttatcatcctgatgcttcccgtgaggaaacggcgcaggccgctgcttcggggggtctttccgaactgatccgtgatctgcccggcggtcttgacggccggatcggcgagggcggacgggcgctcagcggagggcaggctcagcgtgtcgcgctggccagagcctttttaggaaaccgtccgattctccttttggatgagccgaccgctcaccttgatattgaaacagaatatgaaataaaagaaacgatgaaagacctgtttgaaaa

SEQ ID NO: 87 - DNA, 565 bp, Bacillus amyloliquefaciens
tccaacaggagaaaccggtccaaccggggatacaggagcgactggtgtaactggtccaacgggtgcaaccggctcgacaggagaaaccggctcaactggtgcaacgggatcaacaggcccaactggggtaacaggatcaaccggtgcaactggagtaactggggcaacaggatcaacaggagcaacggggtcaactggagtgactggggcaatcggcccagcaggaccaacaggcgcaaccggagcaacgggtgcaatcggcccaacaggaggatctgggtcaaccgggtcaacaggagaaatcggcccaaccggagcaaccggctcaacgggagtaacaggagctactgggataactggtgcaaccggagtaaccggttcatcgggagtgactggttcaactggaataacaggagcaactggggtaacaggagtaacaggagcgacaggcccaacaggagtaacaggagcaacgggatcgacgggtgtaaccggcccaatcggcgcaataggagagaccggctcaactggtgcgacgggattaactggagaaaccggtgcaaca

SEQ ID NO: 88 - DNA, 4601 bp, Bacillus amyloliquefaciens
ttccgttactgttggtgagcgagctgctcccgattttcacaacaattctttgttttttcatcgtttctcctccgtggcaatcaatccaaaccggctctcgtcaataaaaaaagcccatttcgtccttatttttcaggacggaatgggctttttttattgacgagagccggtttggattgattgccacggaggagaaacgatgaaaaaacaaagaattgttgtgaaaatcgggagcagctcgctcaccaacagtaacggaagtattgatgaagcaaaaatcaaggaacatacggaagccatttctttattaaaagaaaacgggcatgaagtgatcctcattacctcaggcgcggtggcagcgggtttttccgctctcggctatccgtcgcgacccgttacgataaaaggaaagcaggcagctgccgcagtcggccagacgcttttaatgcagcaatatatggaccatttaaaaagatacggtctgacgccggcacaaattttattaacaagaaatgatttctcaaaaagagagcggtacagaaatgcctatgctactgtaatggaactgttggagcgcggcgtcgtgccgattattaatgagaatgattccacatcagttgaagagctgacgttcggtgataacgacatgctgtcggcgcttgtaagcggtttgattcatgcagaccaattaatgattctcacagacattaacgggctgtacgatgccaatccgaatgaaaacccggacgcaaagcggttcgactatctgaatgacatcacaccagaattgctcgggtatgccggatcagcaggctcaaaggtcggcaccggaggcatgaagtcaaaacttctcgccgcccagaccgcattgtcgctcggggtgaaggtgtttatcggaaccggctccggacgggaaaaactgatgggaattttagacggaaaaggcgacggcacatatatcggcgataaagacctgtcctcagtgaataatacacggcaatggatcatgtttcattctccgatatcaggggaaatcatcattgatgggggagcggagcaggcgatgatccataacgggtcaagtctcctcccggccggtgtcgccgatgtctgcggcagttttccgaaaggggccgtagtggaagtcagaggacccggcggcattatcggcaaagggcagacgcagtactcatccgatgaaattttagaagtcaaagggaagcggagcgaccagctttcaggaacgaagcaggtggaagtgattcacagagatgattgggtgaatttatttgacgagggggaacacaaatgagtgaagtattgcaaaaagcggctttggcaaaagaagcggctgccgaaatggtcatgaaaacgacggctgaaaaaaacgaagcgctccaatgtattgcagacggactcagaaatgaacgccggctgattttaacagagaatcagaaagatattgaagcgggacggaacagaggactgacacctgacattattgacaggctgactcttgatgaaaaacgcctgctcgatatcgcggacgccgtggaactgttaatcggtcttgaagatcccgtcggtgagtcgctggagaccattcaaaaagagaatggattatccattgaaaaaatccgcgtgcccctcggagtagtgggcatgatctatgaggccagaccgaacgttaccgtagacgcggccacactctgcttaaaaaccggaaacgcggttgtgctcagaggaagttcttccgccatccacagcaacatagcgcttgtcagtgtgatgaaacgcgcactcgggctgtcaaagcttccgattgatgccgttcagctcatagaagatacaagcaaagaaaccgccaaacagctctttacattaaatgacgggctggatgtattgatcccgcgcggcggtaaaaatttaattgatcttgtggtcagggaatcaaccgtacccgttttagaaaccggagcgggcaattgccacgtgtacatagatgagtcagcagatcctcaaatggcaagcgaggtcgtcatcaatgccaaaacacagcgtccttcggtctgcaacgcgattgaatctcttttgattcatgaaaaatgggctgaagaacacggccgaaagctgctgaatcagctgacagaaaaaggcgtggagctccgaggagatcaggtgatttgcgggctggagcctcaagcgaaacaagcagaagaagccgattggggagcggagtacctggcgccgattctcagtgtgaaaacggtgcaggacgtacaggaggcggtccgccacattcagcagtacggcacaaaccattcagaagccattctgacggagaacgccgagcatgcagcttacttccagaccgccgttgatgccgccgccgtgtatcataatgcttcaacccggtttacggacggttttgaattcggatacggagccgaaatcggcatcagcacgcaaaagcttcacgcgagagggccgatgggacttccggcgttaacatctacaaaaatcatcattaaaggaaacggacaaatccgggtataatcttttaagcttatccttcaaaaagggtaggctttttttatgcggaaagattgacgccctctattatattgtgtaatattaaattgtacacaatataatagaggtgaatttagatgacaaaaccattatttactgcaaccgtatcagccgctggcggacgtgaagggaaagtcacgtcttctgacggagtgctgaatcttgatgttgccatgccgggaacgccaagagcgaaacggctcgaacatgctacaaaccctgaacagctgtttgccgcaggatattcagcctgctttgacagcgctcttcagctcgtagcgagaaaagagcgtctgagtattgaaacagaggtcactgcgcatgtcagtctgctgaaagatgaagcagaccaaggatataaactaggcgttacgcttgaggtcaaagcatccggcattgataaacaggagcttgaagcccttatccaaaaagcgcacggtgtctgtccgtattcaaaagcgacagcgggaaatattgaagtgaagcttctggcagcagaataaaaataaggatgcccattcggggcatccttattttttgccgtgcagcgtattcaaaacctcataaagcgactgctttaactgctttaattcctcttttgaccgtcccgtctgttccagcatggcaatgggaatatccgccgctgttttctgcaaggcccgtccttcatctgtgagcctgatcgtcacggaccgctcgtcttcagccgatcgctttctcatgatgataccgtgctgctccatccgtttcagcatcggtgtcagcgttccggaatccaggtacaaaagctcacccatccgtttcacattcagttcttcgtgttcccataataaaagcagcgccaaatactggggataagttacgttgagcttatcaagcagcggtttgtaccgcttcgtcatttcccttgagcttgcgtacagcaaaaaacaaagctgattctccagtttcatatgttcaaattctttttctgccattacttctttcaccaactctttgtttgttaacgttacccctattgtagccgaaaaacggcccatttcctattgcaatcatgtttaaaaatatgagcaggggcaatatatacagtaagtacaatgaggaggctgataataatggcattatttacttcaaaagcgaccgcagtcggcggacgggcaggacatattaaatccgaagacggggtgctggattttgacatcatcatgccgaatgcaaaaaaagacggagaaaccggcacaaaccctgaacagctctttgcggcaggatatgctgcctgcttcgggggagcgcttgagctcgccgctcaaaaacaaaaaatcgacatgacctctgaaattgaaggacaggtcagccttttaaaagatgagagtgacggaggttacaaaatcggcgtaacgctcgtcattgatacaaaagatcttgacaaagaaacggcggagaagcttgtgcaggctgctcacgagttctgtccgtattcaaaagcaacaagaggaaatgtagacgtcaaacttgaattaaaataaatcaacgaacgaatatcccggattttatatccgggatattttattaacgaaaacatcagtaatgatctcttctctcccggaataagaatacgatatagcacttttgcataatgacaccaagagaaaagagggagatatcgatgtctcttccaaacataccgaacatcacccccgacattacactctccagatgtgagaccctgaacctccttctttcatccgtggctatggaagaaatcggactatcccatattctgcaggcggaagcggaaaggattcaaatgtttctcggcgcttccggcgatccctctttggaggaattgtcatcaatcaatagaagcactgaacggctcctgcgcaccgtcatgaaatcacaactccttttgcagacgaagcttgaggacattatcttcttacaggattctgaagcctgtatggacccggacgacccaagcaatccgagtaatccgggcgatcctgatg

SEQ ID NO: 89 - DNA, 9468 bp, Bacillus amyloliquefaciens
tttcttcacgctcggcggcgattcgatcaaaggcatccaaatggcgagccgtctgaaccagcatggctacaagctggagatgaaggatctcttccagcatccgaccatcgaagagctcgtctcttatgtggagcggacggaaggcaagcaggccgaccagggacctgtcgaaggcgaagcggagttaacgccgatccagcgctggttctttgaacgaaactttaccgacaaacaccactggaaccaatccgtcatgcttcacgcgaaagacggctttgatccggacctggtggaaaaaaccctgcaagcattgattgaacaccatgatgcgctccgcatggtttaccgtgaagaaagggaaggcatcattcagacatacctccctgtcacagaatgcaaggcaagctttgacatcgttgatctgtacggaactgacgaggatatgctgaaaagccagattcagcggcttgccgatcatcttcagggaagtctggatctggagaacggtccgctgttaaaagcggagcaataccggacagaactaggcgatcatctgttaatcgcgattcaccatctcgtcgtggacggggtttcatggagaattctgcttgaggatttcgcttcaggttataaacaggcgcagcagcaaaacagcatcgtcttcccgcagaaaacccactcctttaaagattgggcggaggcgctgaacacatttgcgcaatcagaagagctgaaaaagcaggcggattattgggcgcaggcagatgcggaagaactccagccgctgccgaaagatcatgatccgaacaaacggctcgtcaaacatacggcggccgtgaaatgtgaattgactgaggaagaaacggcgcagctgctcacagatgttcatcatccgtacggaacggaaatcaacgacattctgctcagcgcgctcggcttaacgatcggtgaatggacggaaaacggcaaagtcggcatcaacttagaaggacacggccgggaagaaatcataccgaatgtcaatatttcacggacggtcggctggtttacggcccaatatcctttgattctgcagatcagcaaggaagacggcgtctcttccgtcattaaaacggtaaaagagacggtgcggcgcgttcctgataaaggtgtaggatacgggattctccggtatctgtcatccgataaaacagaaagaggcgtcacgcctgaaatcagttttaactacttggggcagtttgacaatgaagtgaaaacggaatggtttgagccgtctccatacgatatgggacgtcaagtcagcgaagagtcagaggcgttatacgcactgagcttcagcgggatggttacaggcggccgcttcgtcatttcttgctcatacaatcaggaagaatatgaaagaagcaccgtcgaaacacagatgcagcggtttaaagacaatctcttaatgatcatccgccattgcacggccaaagaggagaaagaatttacgccgagcgatttcagcgcgcaggatcttgagatggatgaaatgggagacatctttgacatgcttgaggagaatttaacgtgacaaaaacagatcacagaaggggggagcggagcagatgagccagttcaaaaaagatcaagttcaggacatgtattatttgtcgccgatgcaggagggaatgctgtttcatactctcctgaatcccggccaaagtttttacatcgaacaaatgacaatgaaagtaaaaggcagcttgaatatcaaatgccttgaagaaagcatgaatgtgattatggaccggtacgatgtatttcgtaccgtgttcattcacgaaaaagtaaaaaggccggtccaagtcgtattgaaaaaacggcagtttcagatagaagaaatcgatctgacacatgtaacggacagcgagcaaacagccaaaatcaatgaatacaaagaacaggataagatcaagggctttgatttgacgcgggatattccgatgcgggcagccatttttaaaaaatcggaagaaagctttgaatgggtgtggagctaccaccacatcattttggacggctggtgcttcggcatcgtcgtgcaggatctgtttaaggtatacaatgccctgcgcgaacaaaagccgtacagcctgccgccggtcaaaccgtataaagactatatcaagtggcttgaaaagcaggataaacaagcatcactgcattactggcgcgggtacttagaagattttgaaggacaaacgacatttgcggagcaaagaaagaaacaaaaggacggctatgagccgaatgagctgctcttctcactgccggaggaggaaacaaaagcatttaccgagcttgcaaaatcgcagcataccactttgagtacggcgctgcaggcggtttggagtgtattaatcagccgctaccagcagtccggcgatttgatcttcggcacagtcgtttccgggcgtcccgcagaaatcaaaggcgttgaacatatggtcgggctgtttatcaatgctgttccgaggcgggtgaagctgtctggggataccacatttaccggcttgctcaagcagctgcaggagcaatcgctgcagtctgagccgcatcaatatgtgccgctctatgacatccaaagccaagccgatcagccaaagctgattgaccacatcattgtgtttgaaaattatccgcttcaggatgcaaaaaatgaagagaacagtgaaaacggctttgatatggaggatgtacacgtttttgagaaatcgaattatgatctcaacctgttggcttctccaggtgatgagatgctgattaagcttgcctataacgggaatgtgtttgatgaggcgtttatcctgcgcttaaaatctcagcttctcacagcgattcagcagctcatccagaagccggatcagcctgtcaatacgatcagacttgttgatgaaaaggaaagagagcttctgcttaccggcttaaacccgccggctcagactcatcaggcgaagcctctgacggattggttcaaggaagcggtgaatgtaaatcctgatgcgccggcgcttacgtattccggccagactctttcctaccgtgaattagatgaggaagcgaaccgtcttgcgcgccgtttgcaaaagcaaggtgcgggcaaaggctccgttgtcgcgttgtacacgaagcgctcgcttgaactggtgatcggcattctcggcgtattaaaagcgggagcggcttatctgccggttgatccgaagctgccggaagaccgaatctcgtatatgctggctgacagtgcggcagcctgtctgctgacacatcaggagatgaaagaaaaagcggctcagctgccgtatacaggaacaacactcatcatcgatgatcaagcacggtttgaggaacaggcaagcgatcctgcagccgcaattgatcccgatgatccggcgtatattatgtatacatccggcacaaccggaaagccgaagggcaatatcaccactcatgccaatattcaaggattggtcaagcatgtagattacatggcattttctgaaaaagatacgttcttatctgtttccaattacgcctttgacgcatttacctttgatttctacgcatcaatactgaatgcggcacggctcattatcgcagatgaacatacactgcttgatacagaacggctcactgatctgatccggcaggagaatgtcaatgtcatgtttgcgacaaccgcactttttaatcttctcaccgatgcgggagaggagtggctgaaggggcttcgctgtgtgttattcgggggtgagcgcgcgtctgtgcctcacgtcagaaaggcgcttgagatcatggggcctggtaagctgattaattgctacgggccgactgagggaacggtgtttgcgacagctcacgtcgtgcatgatatcccggattccatttcctcattgccgatcggaaagccgatcagcaatgcaagtgtttatattcttaacgggcaaaatcagcttcagccatttggagctgtcggtgaactgtgcatcagcggaatgggtgtatcaaaagggtatctgaaccgtcatgacctgacgaagcaaacgtttattccaaatccgttcaagccgggagaaacgctttaccgcacaggggatttagcacgctggctgccggatggaacaattgaatacgccgggcgtattgacgaccaggtcaaaatacgcggacaccggattgagcttgaagaaatcgaaaagcagctgcaggaatacccgggtgtgaaagatgcggtcgttgttgcggaccgccatgagtccggagatgcatcaatcaacgcctacctcgtgaaccggacgccgctttcagctgaagacgtaaagaggcacttgaaaaaacagcttcctgcttacatggtgccgcaaacctttactttcttagaggagcttccgttaacgacaaacgggaaggtcaataaacggcagctgccgaaaccggatcagactcaggcggcgaaagaatggatcgggcctcgaaatgcgacggaagaaacaattgcgcacatctggtccgacattctcggcagacagcagattgggattcatgatgatttcttcgcgctcggaggccattccttaaaagcgatgacagcagcgtcgcgcattaaaaaagagctaggtacggacattccggtgcagctgttattcgaagcgacgacaatcgcagacattgccggttatctgcttcacggtgaagaaaaaggtatgaaagatctcaccatcatgaataaaaatcagtctgacacactgtttacgttcccgccggttctcggttacgggctgatgtaccagccgctggcaaaacagctgtccggctatcgaatctgtgcgtttgattttatcgaggaagacaaccgcatcgaacgctacacagagctgatcaatcagctccagccggaaggaccggtcaagatgttcggatactcggcaggctgtacgctcgcctttgaaacggccaaacggcttgaagccgaaggacgtaaagtggagcggctgatcatggttgattcttataaaaaacaaggcatcagcgacttagaaggccgcaccgtagaaagtgatgtccaggcgctgatgaaggtaaacagggacaatgaagcgctgaataacgaagccgtcaaagaagggctcgccaaaaaaacaaacgcgttttattcttatttcgtgcataccgtcagcaccggcacggtcaaagcggatatagatctattaacgtcagaaccggactttgcgatgccgccgtggctcgcttcgtgggaggaagccacgacaggtgaataccgtgtgaaaaaaggctgcggcacgcacgcagaaatgcttcagggagaatgtctcgaaaggaatgcggcatatttgctcgaattcctaaggaaggaacatctgaagctgacaacttcacgatagaaaaggaggaagcccgccaatggtccagctctttaaatcgttcgataccacagaaaaaacgcagcttatctgttttccgttcgcaggaggctattccgcatcattccgcccgctccacacctatcttcaaggtgagtgtgagatgcttgccgcggaaccgccgggacacggaacaaatcaaatgtcccccgttgaggattttgaacagcttgtcagtttatacaagcaggagttgaatctccatcctgaccgcccgtttgtgctgttcggccacagtatgggaggcatggtcgctttcaggctggcgcaaaagctggagcgggagggcatttacccgcaggccgtgatcatctcagccattcagccgccgcatgtggaaaggaaaaaagtgtctcatcttgatgatgaaaaatttctcgcccatattatcgagcttggcggaatgccgcaggagttagtggagaataaggaggtcatgtcatttttcctgccttctttcagatccgactaccgcgcgcttgaaagcttccgtccgtctgattctcacatgattcaatcacccgtccatatttttaacgggcggaaagataaaaaatgtatcaaagatgcggacggatggaaaaaatgggccgacaatcccgtatttcatgagttttcggacggccacatgttcatattaagtgaaactgaaaaagtggcggaacgaatctatgagattattaacaggagcacggcaggccaattgttataggatatgacagacagcatttgctgtctgttttttgtaacaaaatccgcccgcgcgttttctcatttatcaaaaattttatgttatgatttgatggaatataattttgaagggattgtcgtacatgaatgatgcagcaaaagagctgaacagaacattatctgaagaaaacccgcacgtgcttcatatgctttctgatttgggcagagagttgttttatccgaaaggggtgctgacacaatcggctgaagcgaaagccagggccggaaagtataatgccacgatcgggattgccacctcacaaggcgagtccatgcacttttcccatattcaagagacactgtccgcctataaccccgatgatatctacgattatgctccgccgcagggaaaagagccgctcagacaggaatggctgaaaaaaatgcgtctcgaaaatccttcattagccggcaaagacatcagcacgccgatcgtgacaaacgctttaacacacgggctgagcatcgccgccgacttgttcgtcaatgaaggggatacactgcttctgcctgataaatattggggaaattacaatttcattttcggtgtccggcgcaaggcatccattgagacatacccgctttttcagcaggatgggcgttttaatgcggcggggctgtccgagctgctgaaaaagcaggaagaaaaggcgattgttgtgctgaatttcccgaataatccgacaggctatacgccgggggaagaggaagcgtcagaaatcgtcagcgtgatcttggaggcggcggaggccggcaaagagattgtcgtgctcgtagacgatgcgtattacaatctgttttacgatgaaactgccattcaggaatccatcttcagcaaactcgcccaagtgcacgaccgggtgctttgcgtgaaaatagacggcgcgacgaaggaaaattacgcgtggggcttccgcgtcggttttattacgtacagcacaaaaagcgaaaaagcgctgcgcgtgctcgaggaaaaaacaaaagggattatcagggggacgatttcaagcgccccgcatccgtcccaaacgtttatgctgcgggcgatgcagtcaccggaatacgagaaagaaaaatcgctgaaatataacatcatgaaaaaacgggctgacaaagtgaaagccgttcttgcagaaaacaagcactatgatgacgtatggacgccttacccgtttaactctggttatttcatgtgtgtccggctgaaagacataaacgccggcgaattgagattgtcgttgcttgaaaagagaggaatcgggacgatatccattaatgaaaccgatttgcgaatcgcattttcatgtgttgaagaggaacacatcgcggatctgttcgaagaaatttatcaggaagcaaagcagctgcagaaacaggcggaaatatcaggctgacaaaaaaggagggggacaccctcctttttctatgcttacagcagctcttcatacgttttcatctcaatcccgtcacaaaaatcgggatgcgccgcacaaacggccagcttatactcctcgtcagcctcatatgtgcggatgaaacaaggttcatgtccgtccgggagctcaatggacacatggccgtcgtctttgaggcggacgctgaatgaatcaagcggcagggaaagcccttttccggcctgtttgataaagctttctttcatcgaccacaggtggtaaaaataatcggtctgctgatcggggtgtttcgcttgcagatcactgtattccgtcggcgaaaaaaaccgtttggcgatatcaatcgtgccgggcttcattttttcaatatcaatgccgatcggttttgaatcaacggcgcacacgatccagcgaccggagtgggaaatattaaagtgcatgtccggaagcgcggggatgtacggctttccgtattcctgaacgctgaatgaaatcccggccggatcaagtccgtaagccttcgccgcagcggtgcggatcagcatgtcgccgatcaaggtgcggtgagcatcctccttatggtaaaagcgccggcatttttcccgcttttcggcggacacggccgccatcatccgatcctcttcccctgcagaaagcgggcggtccatatatactccgtaaatcttcatgtccagatcctccgtctgaaaatattgtcaaaaccatcctatcatatcagacgaaagctgtccgaaaataaaaaaacaaaaccgtttcggctttgtttttaatgaacggacgttgcccgcccggagatcgcgtatgttaacagtttagaggattgcggcaaagaaaaacgcagaatcagccccgtcaaaacagccgtaataatggttccggcgccgatcggtccgcccatcatccaggctgcggcaagaatcgtcagctcaatgccgttccgcacccattgcacgttccagcccgttttttcagatatcagcatcatcagagagtcccgggggcccgcgccgagccctgctgatacgtaaataccgacgccgcacccgatcagcagcaatccgatagaaaaacacacggccgctaaggaaaaagcgtgcgtctcaggaagcagaaacgaaaagaaatcaataaacattcccatcagcaccatgtttaagatagcgccgattttcgggagtgtcctcgtgaacaggcaggttaaagccacaatgaccgcgccgaccacgatggaccattggccgacagaaagaccgaaatgctgaaaaagcccataatgaaaggcatcccaagggctgatgccgagagcttttcctttaatggttaacgataccccgaaagacaaaatcaacagaccagcaaaataaaacgtccagcgcatcaagaattcccgcttcaaagaggtcccttctttcataaaatttcattaattgtcattgtagcataaccgccaaaaaaaagaagaagcgaaatcagtgtttcgcttcttctcccgctcctacaaaggattcagtatacgatttaaaaaccgctgcgtgcgttcttctttcggcgcggaaaagatgtgggccggcggtccttgttccacaatgacgccgccgtcaatgaagatgacttcatcggccacttcctgcgcgaatttgatttcatgggtgacgacgaccatcgtccagccttcgttcgccagatccttaatcactttgagcacctcgccgaccagctccggatcgagcgctgacgtcggttcgtcaaacagcatcagctcgggctgaatcgcaagcgcgcgggcgatgccgacacgc

SEQ ID NO: 90 - DNA, 283 bp, Bacillus amyloliquefaciens
tccgttaataaaagatgatgttcgtcggattctttcacgagagccgcacggaagagcggcgcttcctccagacaaaacggccggacgaatgcgtcagctgactcggcctcatccagctgaaacggtacgctgtcatggatgcgctgcaccggttcgccgtcaggccccgtttcaaaggacgttctgagcgactcatgccgctccacaagctgccggaacgtctcctccagccggctgcggtcaagcgggcccgtcagttccagcacagccggcatattgtagc

SEQ ID NO: 91 - DNA, 3692 bp, Bacillus amyloliquefaciens
agaccttctcgattttttgtttgatttcttttatttgattaatgtgacgcttttcatgatggccgataaaatcaatccactggcggatcgtcagttcttgaaaaacaggatgcggaagcacacgttctaagtcttcctcgtttaatgatgaaatgacggcggtcagctgctgtcttgccgtatctaattcctgttttgcttcaatgactgatattcggttttgctcaggttcgaggtgtgacggagccggccgtttatttgttctgtcctctataaactccatcggttgttcttctatttcttttaacggtgcgtcttttgcctgctttgataaaagggtctgcgctgtttcgtcaattttctttaaatggtcaaggacttcccgcacgctccactcatcagccgcgggctttcggttgaattcctcatcagagagtcctttcagttcttcccaggtctgctgtcttgcttcattaaaaatgctcatcctatctcctcctttagagtaaacatatcatatccggattggataatcatgtaatcagccttccttatcagaaaattgaaaccatttacctttacatccgtatataaagtaacactccgacacctcagccgaaaggaggatagaatgtggacatatttcatctgccgcttgaaacggtctatctttacacattgattatttcgggaagtctcacgcttttgattctgttttttcaagatgtgtttcacggcctctcggaagccattcctgtttcatttttaaaccctgcattgattctgtcttttttaacaatcttttcagcctcaggttatatcggcgaaatcgccgctccgctatcaagtcctgtcattgcgttgctttcatttgttctttcggttcttttggtcagcctgcttcacttcttcgtccttgtcccgctttcatcagcggaagaatcgctcgcgtatcgggagacagatttaaagggcagagtcggcagagtcattacttccgtcccgaaagacggctatggagaagtgatcatagagggaatagggggcgccatttctaaatcagccgtcagctttgatcaagaacagatcaagtacggaacggccgtattagtgattgatgtaaaagacggagtgctttttgtgacgccgcatgaaccaatctgatatctaagggggaactgttatgactatgccgattatcatcgttatcggaatcgtattctttttactcatcgcacttattgctgtatttattacgaagtaccggacggcggggccggacgaagcccttatcgtgaccggaagttatttggggaataagaatgttcacattgatgaaggcggaaatcgtctgaaaatcgtccggggcgggggaacgttcgtgctcccggtattccaacaggcagaacctctcagtttactgtcaagcaaacttgatgtctctacacctgaagtctatacagaacaaggcgtgccggtaatggccgacggaaccgccattattaaaatcggaggctccatcggtgaaatcgccacagcagctgaacaatttttagggaaatccaaggacgaccgtgagcaggaggcgcgggaggtgctggaaggccatctgcgctccatcctcggctctatgaccgtcgaagagatttataaaaacagggaaaagttttctcaggaagtccagcgggtcgcgtctcaggatcttgctaaaatggggctgatgatcgtatcttttacgattaaagacgtccgagataaaaacggctatcttgaatcattaggtaagccgagaatcgcccaagtcaagcgggatgcggacattgccacggcagaagcggataaagagacgaggattaaacgcgcggccgctgataaagacgcaaaaaaatcagagctggagcgggcgacggaaatagctgaagcggaaaaaatcaatcagctgaaaatggcggaatacagaagagagcaggatacagcaaaagccaatgccgaccaggcatatgatcttgaaacagcaaaagcccgccagcaggtgacagagcaggaaatgcaaattaaaattattgagcggcaaaagcagattgaattggaggaaaaagaaattctgcgccgtgagcgccaatatgactctgaagtgaagaaaaaagccgatgctgaccgttactcggtggaacaagcggccgcggccgcaaaagcgaagcagctcgcagaagcggatgccgagcagtacagtatcgaagcgatggccaaggcggaagcggaacgcgtgagaattgacggtcttgctaaagcggaggctgaaaaggcgagaggggaaaccgaagcggaagtcatccgcctgaaaggactcgcagaagcggaagctaaagaaaaaatcgccgaagcattcgaaaaatacgggcaggctgcaatccttgatatgattgtgaaaatgctgcctgaatatgcgaagcaagtctcagcgcctctttccaacattgataaaataaccgtcgttgatacgggaggaagcggtgaaaacggcggggccaataaagtcacaggctacgcaaccaatttaatggccggtcttcaggaaagcttaaaagcatcttccggaatcaatgtaaaagagcttattgagaatttttcaggcaaaggaaacataaaacaaagtataaatgaacttacaaaagaactgagtgattcaaacgaacggcacagcccggaataaaaatacagcaggcgtaaaccgcctgctgtttcagttcgtccgcttagcttcaagaagccgcggcgcagtcatgaataataagataaggacaatggccgaaaggataaaagaaggaatcatataagtcgcgttatagacggacgaataaatccagaccggcgtgcctttcggagcatagcttccgaaaaagacagctccggagaccacatgtgccgcatagcgcagcacactgccgatgaaaacaccgcctataacatacatcgttaaaacgcctctttttttattcaatgccgatccccgtacaccggaagctaacatgccgctgaaaccgaggactgcgaatgccgcgatgtaatcaagaaatagctgcaccgggtgctgcaaaaacaaattgccgatggcgatctggacaatccctgttaaaaagcctgtcgtaagcccggccttcactccccagcggaatgaaatcaaaaaaatcggaatcatcataatagagaccgaaccgccttggggcatccggagaaacatacctgagacaatgtccagaatgacagccgccccggtcataatcgctatttcaattaagcgcacaagctgtgttgaatgattcatagttttcccccctggtcagacaaccgtatcaaggataaacaaaaaagcagcgcggggaaggatgggaaaagtccgcgcgctgcttacataaactgcaaatcatttggctttgccacatccctacgccagcgttaactaacaggttcaaagggtcagaacaaaatgttcactctcagctttaatgctccccttgtggtcatcaagtatttagttcaatcttactatacaagaaaatatgccaaaccacaagacagcttatctttctatagaagagaaactgaaataagtatgaaagaaaataattaatgatttttttaaaaaaactattgtcatattttcaaaagggtgttatattattaaacgtcgc

SEQ ID NO: 92 - DNA, 490 bp, Bacillus amyloliquefaciens
tccgcatatgcggaggcttttttcagtttaatagaattgatgaagcagcagaagggtgacactcacggtaatcgctccgccgatcctggtcgacacttgggcgaacggcatcagctcaagccgttcagcggcgctcaagatcgcgacgtcgccggtgccgccctggccggaatggcaggcattaataatcgccgtctcaatcggatacagattcagccattttccggtcagaaaaccgacggccatcatcgtgacgacgattgataaaatggtaatgatgttgctgatcgtaaacgccgcaatcagcttgtcccacggtgtcattgaaacgccgatcgcaaataagagcggataggtcacggctgtcgagaaaaagcgcgagacgccgaaggctccgttttcaatcgaagccggcgccagcctgaacagcttaatgagaacggcaaggacgagcatcacgacaggagccggaagctgaaagaaatcatgc

SEQ ID NO: 93 - DNA, 1374 bp, Bacillus amyloliquefaciens
attgtagccgacaccgccatcttcaagctgctggagcacatacatccgtttctgcgccgaagacaccggataggtgtcctgttttttcgcaggctgaatcgcttcatacgggctctcttccaagtcctgaataaccgaagcaagctcttccaccgtcggccgggcgaagatgtcctgtaacggcacctgaacaccgaactctttggcgatgcgggagacgagagccgtcgcttttaacgaatggccgccccgctcaaaaaagtgatcccggatgccgacggggccgttttttagcacctcttcccaaagagcgcaaagcttcatttccgtgacgttccgcggggcggtgtctgccgctccgccgggagccggcagcgcgcggcggtcaagctttccgctcggcgtgaccggccattcgctcatctttatgaactgagccggcatcatgtaggccggaaggcgtgtcgcaagctctgcccgcacgtcatcgctttcccgtccttcgatataggcgtaaagcgcggtttcgccgtgttcggtccggggggtgaccgccgcctcacgaatgccgtcgatgcgccggatcgccgcttcgatttctcccggttcaatccggtagccgcggactttcacctgtccgtctgaacggccgagccattcaacaaggccgtcttctgtccagcgtgcgatatcacccgtctgatacatgcgttctcccgggtaaaacggatcatcgagaaaacgctcctctgtcagctcaggccggttcagatagccccgggccacgccggtccccgcgatgtacagctctcctgccacgcccgcaggctggatggttcccccgctatctaatacatacagacgggcacccggaacgggttttccgatcggaagccttgtccgtccgctgtcccgttttcggtcacagacgtaaaacgccgcatcaaccgtcgcttccgtcggtccatagccgtgaataagcatcgtctccggcaacagatctgcaaaccgggcagccgtaagcggggaaagagcttcgcctccggcaaacacgcgtgtcagtgttctgccgaggcgtgttcttgtttcctcaggctccgtttccagcgcgtctaaaaagctgttgaccattgccggaataaaatgcgcggtcgtcaccttttctgaggcaaacgcttcaatcatccgcacaggatctttctcccagccggcaggaagcagatacacggaggcgcctgacatcgtccaccaaaacaattgccagatagaggcgtcgaatgaaaaggatgatttcagcacgataacatcctcttccgttaacggaaactgcccttgcatccctgataaaaaggcggcggcctgacggtgttcaac

SEQ ID NO: 94 - DNA, 938 bp, Bacillus amyloliquefaciens
agttttcaaagatcattttgttcactttcccaagcaactttttaattatataataagtttctcttaaagtcaacatgtttttttataaatggtggagcctagcgggatcgaaccgctgacctcctgcgtgcaaagcaggcgctctcccagctgagctaaggccccgaagtggtcgggaagacaggattcgaacctgcgaccccatggtcccaaaccatgtgctctaccaagctgagctacttcccgatttttaaaaatattatggcgcgcccgagaggagtcgaacccctaaccttttgatccgtagtcaaacgctctatccaattgagctacgggcgcataacaataatgccgagggccggacttgaaccggcacggtagtcacctaccgcaggattttaagtcctgtgtgtctgccaattccaccaccccggcgtggatggtatagttggagcggaagacgggattcgaacccgcgacccccaccttggcaaggtggtgttctaccactgaactacttccgcatacaggatcactatcctgtataatgcgggtgaagggacttgaacccccacgtcataagacactagatcctaagtctagcgcgtctgccaattccgccacacccgcgtaacatggtgagccatgaaggactcgaaccttcgaccctctgattaaaagtcagatgctctaccaactgagctaatggctctttttaaaagacttatgttattatcttgtccaaaaatggtgccggccagaggacttgaacccccaacctactgattacaagtcagttgctctaccaattgagctaggccggcaaatatggtggaggatgacgggctcgaaccgccgaccctctgcttgtaaggcagatgctctcccagctgagctaatcctccatatattacacttgcgtgtaatggcttggcggc

SEQ ID NO: 95 - DNA, 4886 bp, Bacillus amyloliquefaciens
agctgaaagaaatcatgcgccagcatgccgaccaaatagagggaaaccgctaaaataccgcccgaagcgaaaaaggacaaatcaaacgttttatcattggtaggctgttccaatgcgggagcggaatgatcagacttatcaaccttcccgttgcccgtccattccggtttgcgtttcccgatgacattcagcaaacccgataacataatggcgcacaggctgccgagcatgatggacggcagcacaagcgcaaaggcgtctccctgggacatcggcatcatatcggagtagccgatggataaaggaatcgcgccttcaccgacaccccccgccataatcggaacgacaatataaagcagcgtgtgctgaaagccgagcccgagcagcgtcccgacgcataagccgacgatggcggccgcgattgagccggcgatcagcggaataaaaatcttgacgaaagctttgacgagcgtctctcttttcatcccgagaatactgccgacgacgataccggcaataaatagatagagaaagttggagctttccgtgaattttgttgttgaagtaataatgtctttcggaagcaagtggtagtagacgacagcggatggaataaaggttgcgagaatcgcagggccgccgatggaccgcacgatcggaatggattttccgatctggccgaaggtaaatccgaaaaaactcatgacggcaattgatgtcagaatgtcgctttttacatcacggctcatgacaaacaccgtaataagcaaaaaaagcaggatataaataggaagaggaataatgccgattcttatattcattgctctggcaaaccagttatcagtccgttcctgtttttggattgaatccgtttgcaattttggttgaagttctcccatgcttgttcccccagtcgttatgtagtgaaaaaatatccccatttaaagtttactaaaaaatttaaattgttcatatattatgaatttactagaggacatgttttcttcacattttctttctcgaaatggcaatttggcgggctttttcaccgagaaaagcattttgttcgccacacgaataaaaaagaggtacgatatcaaagggacaaatatcctatgtgctgacataaaatctctacaaatccgacattaatcggtcacaatttcagccttattttaggtatattgatctttttttttaggctgaatcgttgtaaagtaatgatattgaatcatttctatgacagccgctgtcccccagggtgtacaggctgatatttcaatagttttgacgaatttgtgaaacattgagcaaatatatcattttttgtgaaataccgagcaatgatttcgctatgtttgtgaaatgttgagcaatttaccagattggaggaaaaacatcatgagtgagttggtattagcccgcattcaatttgcatctacaacattgtttcacttcttgtttgtgcctttgtctatcgggcttgtgtttatggttgctttgatggagacgctttatgttgtcaaaaaacaagagacctatctcaaaatggctaaattttgggggcatctctttttaattaacttcgctgtcggcgtcgtcacagggattcttcaggaattccagttcggattgaactggtctgattattcccgttttgtcggagacgtatttggtgctccgcttgcggttgaagcgcttttggcgttttttatggagtctatttttatcggattatggattttcggctgggaccgtttatctaaaaaagtgcatttgctttgcatttggcttgtgtccttcggaacgattatgtcatctttctggattttgacggcaaactcattcatgcaggagccggtcggctttgcgattaaaaacggccgcgcggaaatgaatgatttcggggcgcttctgacaaaccctcagctttgggttgaattccctcacgtcattttcggggcgcttgcgacgggtgctttctttatcgccggtgtcagcgcatttaaattattgaagaaaaaagaagtgcctttcttccataaatctttcaagctttcgatgattgtcggtctgatcgccggtatcggcgttgcgttcagcggacatatgcaggctgagcatttaatggaatcgcagccgatgaaaatggctgccagtgaagcgctttgggatgacagcggtgatcctgccgcgtggacggcttttgcgaatattgatacgaataaagaaaaaaacacatcagaaatttcaattccttacgcactcagctacttggcttaccagaagttcagcggcagtgtgaaagggatgaaaacacttcaaaaagaatacgaaaaaacgtacggaaaaggcgactatatcccgcctgttaaaacgacgttctggagtttccgcattatggcgggagcgggcgcgcttatgatttttgccgcgattgccggctttattctgaaccgccgcaaaaagcttcatacgagcaagtggtatttacggggcatgatcgcactgatcgcatttccattcattgcgaactctgccggttggattatgactgaaatcggccgccagccgtggacggtcatgggacaattgacgaccgcacaatccgtttctcctaacgtaacgacgggatctctgctgttttcaattatcagcttcggcgtcatgtacttgattttaggcgcgctgcttgttttcctattcgttcgtgaaattaaaaaaggtgcggaccatgatgatcataaggatgttcctgtgtcaacggatccgttcagtcaggaggtctaccatggggtcacttcatgatctttggtttatactcgtttcagttttgtttgtcggatttttctttttagagggttttgatttcggtgtcggcatttcgacccgatttcttggccataatgaattagaacgcagagtgctggttaacaccatcggcccgttctgggatgcgaatgaggtgtggcttatcacaggtacgggagcgatcttcgcggcattcccgaactggtatgcgacgatgctgagcggatattacattccgtttatcatcattcttcttgccttgatggggcgcggcgtggcatttgaattccgcggccaagtgaataatctgaaatgggtcaaaacatgggactgggtgattttcttcggcagccttatcccgccatttgtattcggacttattttcacaagcttgttccgcggtgtgccgattgacggacatatgaacattcacgcaggtttttcagatattgtgaacgtgtattccgttcttggcggagcagccgtcacccttctttcattcctgcacggtttaatgtttatcaccctgcgcacgatcggtgatttacaagagcgtgcgagaaaaatggcaaaacgcgtaatcggtgttatctttcttgttgtacttgctttctttgcgatgtctgcatacgatacggatatgtttacacgccgggcaaacatcacgattccggtattcgtgctgattgtcatctgcaacgttcttgccgttgtgttcatgagcaagaaaaaagacggctgggcattcggtatgaccggcgcgggtcttgctttgacagttgcgatgatttttatctctctgttcccgcgcgtcatggtcagctcgctgacaagcgcgtatgacttaacagtagctaacgcgtcttccggtgattattcacttaaggtcatgacaattgtcgcactgactctgctgccgtttgtcatcggcagtcagatctggagctattatgtcttccggaaacgcgtcagccataaggagcctatgacttattaatgggaaaagacctgtttctttataaaggaatgaagcggattcttgcgatcattacgggattaacgattatacaaacggccgccatcatcttgcaggcggaatggctgagccaggcggtaaccggattatttaacgggaagcggattgcttctctttatccggttatcggctttttcctgcttgcgtttttggtccggcatgcggtgacaacggtccggcagaaaatcgtgtaccaatatgccgcgcaaaccggcgcagacttaagaaaaagatttcttgagcaattgttccgtctcggcccccgctttgcgaaaaaagaggggacgggccggatggtgacgctggcgatggaaggcatcagccagttccgccgttatttagagctgtttctgccgaaaatggtcagcatggcgattgtgccggcggccgttgttatttacgtgttttttcaggataaaacatcggcattgattctgattcttgcgcttccgattttgattgtatttatgattctgctcggacttgtggcacagaaaaaagccgatcgccaatggaagtcctatcagacgctttccaatcatttcgtggattcgctccgcggactggagacattgcggtttttaggattaagcaaatcacacagtaaaaacatctttcatgtcagtgagagataccgcaaggcgacgatgagcacgcttcgggtcgcgtttttatcatcattcgccctggatttctttacgatgctgtcggtggcgacagtggcggtgtttctcggcttgcggctgatagacggacaaattctgctcgggccggcattgaccgcgctcattctcgcgcctgaatattttctcccggtccgcgaagtggggaatgattaccacgcgacgttaaacgggcaggaggcggggaaaaccattcaagcgattttggcgcagcccggttttaaagaagaaaagccgctcgaacttgatacgtggactgacggggatgaattacagcttacgcgtttgtccgtccgagaatcgatgtctgaatttcatttgtcctttaaagggaagaagaaaatcggaattatcgg

SEQ ID NO: 96 - DNA, 1944 bp, Bacillus amyloliquefaciens
ttttttcttatgccggcagaagctgttatgatccgtttcccgggaaatagcctgaaagctgtttcttaaaacgaagtggatacaatcggccggacgttttatactgaaaatatgatagagcgatagagaggagcgcatatgaacccgttattggcaatttacccgagggctgtgttgtctgatacgtgctgtacggcggaggatgtcttttgcttttatgatgagaaaaggcgggtctatgtcaccattccgaaggaggatattgccccgaaggagaaactgcttctggaatcatttttgacgcccgctgaagaaaaaggcgatttttttccggagacggcggcagcaaagaggtggcggcggtttctgctggaagagggtccggtgcctgatgtcaaggagcctcgtgtccgttttatccattatgacttattgagagaacgggactggggggcatttacggaagcgctgcgccatttctggccggtttcatatacagttgtccggacgggaagggatcaaggcgtgattgtggaggaagaaaagctggaagcgccagattcggatgacatcgcatcttttgtgaagattctcgaaggcgatttttatttcagtgtccgttttttcatcggaaggtattacggcgcgggagaacgtctgcgccttcattatcggagagaacagcaatattgtcagattggccggcgacatctcccgcagctgagcacgctgaccgcggaaacggtatttccggccatgctcatggaagaaagcagagaaaagctctcagccttgcttcacgaagaagcggcgctgctgtttcagaaagaaccggggctgaagcatacgattcagacttttattgaacataactcgaacatgtcgctcacatcgaaaaaactgcatttgcaccgcaacagtcttcaatatcggattgataaattcgcggaacgctcaggtattgatattaagacatatcggggcgccctgctggcttatttcatttgtctgcagtctgaaaaatcacattaaatgggaaatgtgcacgaaggcagcggactttttttatgaacattgcctatatccgccgccgtctgacgctgttacaatcctatttaagaaagcggttacaaaaaaggagagatgacatggcggaacttcggctggagcatatttataagtattacgatcaaaaagaagcggctgtcgatgattttaaccttcatattaaagataaagagtttatcgtgtttgtcggtccgtcgggttgcggcaagtcgacaactttgcggatggttgccgggctggaggatattacgaagggtgatttctatatcggtgacacgagagtgaatgacatcgctcctaaagacagggatatcgccatggtgtttcaaaactatgcgttatatccgcacatgacggtctatgataatatcgctttcggtctgaagctgaggaagatgccgaaacctgagattaaaaaacgggtcgaagaagcggcgaaaatgctggggctcacagagtatctgcaccgcaaaccgaaagcgctctccggcgggcagcggcagcgggttgcattgggacgggcgattgtcagggatgccaaagtgttcttaatggatgagccgctgtcaaatctggacgcaaagcttcgggtgcagatgcgggcagaaattattaagctgcatcaaaggctgcaaacaaccacaatctatgtgacgcacgaccaaacagaagcactgacgatggcgacacgcatcgtagtcatgaaggacggaaaaattcagcagatcggcaccccgaaagacgtgtatgaacatccggaaaacgtatttgtcggcgggttcatcggctccccagcgatgaactttttcaaaggaaagctgacggacggcgccattcagatcggttcagccgctctcagcgtgccggaagggaaaa

SEQ ID NO: 97 - DNA, 932 bp, Bacillus amyloliquefaciens
ggacgccgccaagcttttttattttatctaccatgtttttgtttatgaagcttataatattccgcagtagctcagtggtagagctatcggctgttaaccgatcggtcgtaggttcgagtcctacctgcggagccattgcttccatagctcagcaggtagagcacttccatggtaaggaagaggtcagcggttcgagcccgcttggaagcttatctaaaatacgttgatctgaagcagtttccgcatgttatggaactgttatttttttatttggatcagtaaaaactgttactgattgcagcagttaaggtataggtgtttaaagcgcgctttctgatgaagttagccttgcttcaatgattcaaagagattaacataattaattgttaaacggtattgacttttatcaaaaccttgatataattacttttgtcataatgagcagtatgtttaggttgatctgtgggttataccgtttggatttttactgaataaataataatacagtttaccgctatctgagactgtattctggccatgctttacatttttacttgcggaagtagttcagtggtagaacatcaccttgccaaggtgggggtcgcgggttcgaatcccgtcttccgctccattttatcccaacgggatattgtgatattaattgcgcccgtagctcaattggatagagcgtttgactacggatcaaaaggttaggggttcgactcctctcgggcgcgccataatatttttaaaaatcgggaagtagctcagcttggtagagcacatggtttgggaccatggggtcgcaggttcgaatcctgtcttcccgaccattctcaaactttaaagataatatactggttttctttttctctctttttttaaaaaaatgcttgatttatagagagacaccgtggtatattattaaacgt

SEQ ID NO: 98 - DNA, 1043 bp, Bacillus amyloliquefaciens
tgccggcataagaaaaaaccctccgcgccggcagagggatcctttttatttagagatatcgacgaagccttcaccaaagacgtcacgcacatcatgaacaatgacaaacgcttttgtatcacagcttttaataatttttttgagcatggaaagctcttgtttctggatgacgatatataaaatttccttcgactgccccgtgtaatttcctttacccgacagcagcgtaacccctctgtccataagcgtgttgacctgttcagcgatttcgtgcttatgctcagatataatcgtcaccgcttttttcgtattcaggccttcaatgataaagtccatcaccttcgttccgatgtacagcatgacaatggtaaacatcattttttccgcaccgatgatgaaataagaactgaagacgacaatcagatcaaagaacaaaagcgcatagctgatattccaatcgagatatttgttcgcaatcctcgccaaaatggcagaacccgcagtcgttcctccgactcgaataatgatcccgattccgacaccggcaaacacacccgcaaaaatagtattaataatgagttcatgtgaaggcgagtgccaatcatgcgtcagatgcagaaacagtgaattggcaacaacggtaatgatcgtataaagcgttgtttttccgtctaaaaatttatatccgataatcaataagatcccgttcaaaatgatattcgtcaccccgggcgaccattcaaacacatagtacaagatcagggtgattcccgttaccccgccctctccaagatcattcggaatggcgaataaattaacggccaaagcaaagataaaagccccaataatcagcatcagcacatccagcaatctctttttcatcccagacactccctttatataaaatcaaaaaagcccgggagagcactcttcattaaaagagcagaaactcccgggcttttatcccaacgtgtcacagcaggaacctgctgtgtgttttctctcggtccagaccaattcagcattgcggaaccctagaaaac

SEQ ID NO: 99 - DNA, 231 bp, Bacillus amyloliquefaciens
ttgtttagttttgaaggaactttgattctttcatatggtagatgggcctgtagctcagctggttagagcgcacgcctgataagcgtgaggtcggtggttcgagtccactcaggcccaccatctttacccaatacggggccttagctcagctgggagagcgcctgctttgcacgcaggaggtcagcggttcgatcccgctaggctccaccaacgtgttctttgaaaactaga

SEQ ID NO: 100 - DNA, 1288 bp, Bacillus amyloliquefaciens
taactggtgtaacaggactaactggagcaacgggagtaacaggcccaaccggtccaacgggtgtgactggagcaactggagcaactggagcaactggagtaactggagtaactggagtaacgggcgccacaggcagtacaccaaccttgctcttcacaagaactaacgggccgctcactgtttatccgccgttaaatacagaggttcccattgctacgctggcaatcccggttaacgctttgcagaatgtaaagcttgattatgcactcagtgtcgcgctaacaactgcagcgaattcaaactttgtttttgaagtgagattatataggggagcagtgcaaattcatacaagaactctgtcgcgaactaatactaccgcagctacggatagtttttcgattgctgatacaacagtggatacagcgccgaccgcaggaacaaatacgtaccagttgagagttgttttcacaactgcaaataatataacagcagcgtcagctctcaatatcgattttaacagcattcgtttcccgacaacctaatgacaatagcagactgatattttaaaggtgaaagacctgacttatgcacagttaggtcttttttctgtaaaatgctgtgcatgatgcagtcttaacgaacatttaaaaaatcgcccaatagaagtggggttttgccacaccttttttcttcgtggaaatattatgaaaatagaggtggtgtaatgagaaaaggagatacttggtataacagatacgactcttgggattgcgactgccggaattgcaatgattgttgctgtcattttcaacataaaagaagatatcaaaggcgcagttatcaaaatcgggcacattgctgtgaaggattctgttgcgaaaactcttgctgccatgaaagatggtgtccatgctgtcatccaaatcattttcatgtaagaggattcaccggagcaacggggtttaccggagcaacggggctgactggagcaacagggctgactggagcaacgggattcactggagcaacggggtttaccggagcaacgggattcaccggagctacgggctcgactgggaataccggagcgactggggtaaccggcgtcactggagatcccggcgcgactggagccaccggcgccacgggagtaacgggagcaacaggctcgaccggagcaaccggcgccaccggggtaacgggagtgactggaataacgggcacgactggagccaccggagatcccggcgctactggagtaacaggtgccaccggagtaacgggagca

SEQ ID NO: 101 - DNA, 863 bp, Bacillus amyloliquefaciens
ctttcatacacattcggtttgaccggaaaaagtatgtctgtaaatgccgcttgtgcatcgtcgcttgttgctttacatgaagcggttaagtcattgcggacaaaagaaagtgattatgcaatcgcatcgggggtaaacttgaatttccaacccggaaaatatatttctttttctaaagccagaatgctgagtcctgacggcaaatgtaaaacctttgacgcagcggcgaatgggtacgttcccggagaaggggcaggcgttgtattgctgcagcgccttggtgatgcagtaaaagccggtcaccatatatacgggatcataaaagggacagctgttaatcatggcggtaaaacccgttccataaccgctcccagagcagaagcgcagtgccgggtcatctcagaagctttacacaacgctgctgtcgatgctgcgacggtttcttatgtagaagcacatggcacaggtacatctctgggcgatccgatagaaatagaagcattgacaaaagcgtatcggcaatatactgagaatactcaatattgcaggatcggaagtgtgaaaacaaatatcggtcatacagaagcagcggcgggaatggccggattgataaaagttctaatgatgatgaaacaccggagggtgccgaaaagcctgaatgtacatacggtaaatccaattatacagtttgaaaaaacaccgtttaggccggcgcttgattcaagtgattggaaggcggcagacggggctccgctcagggcgggaatcagctccttcggttttgggggtgttaactctcacgtcatcatcgaagaatttatacatacaaaagacgaatctgacagaaaaggaagggtaccctt

SEQ ID NO: 102 - DNA, 935 bp, Bacillus amyloliquefaciens
cacgggcggagacagcggcatcggcgcagcggctgcgatcgcttacgcgaaggaaggggcggatcttgccatcctgtacctagacgaacatgccgatgccgagagaacgaaaaagcgtgcggaagaataccaggccgaatgcctgttaattccgggagacgtcggtgatgaggcgcattgtcagaaggcggtccggcaagtcttagatcactacggaaaaatagatattctcgttaataatgcggctgagcagcatccgcaaaacgggattcttgatattacggctgaacagctggagaagacattccgtacaaacatgttttctatgtttcatatgactaaagccgtgctgcctcatctcaaaagagggagcgccatcattaatacaacgtcgattaccgcttatcagggagacacatcattgatcgactattcgtgcacgaaaggcggcatcgtttcctttacgcgttcaatggcgatgtcattggccgatcaggggatcagagtaaatgcggtggcccccgggccgatctggaccgccctgattccggcaacgtttactgaagaaaaggtggaaaagcacggtctggacactccgatgggaagaccgggacagcctgcggaacacgccggagcttacgtgcttctggcttcagacgaatcttcctatatgacggggcagaccattcacgtaaatggcggcaggtttatttcaacataatacgcaagtcttatcccgcacttttaaaaagtgcgggatttttatttgattacatatgaatacgatttttaaaaaatggaagtctccagccgaatcactaatgttaatatttcacagcagagaatccgctgagttctgttttatgaaaactgaaataatatatagaattttcaaaaaagttattttcatttttatatttttcgctataatatga

SEQ ID NO: 103 - DNA, 374 bp, Bacillus amyloliquefaciens
tgtcgggttcggcaattctgtgacgggcgtcaatgtcggagggggaggcgcaattgatcttaccggggctggaggaactctgctgaactttgctttttctgctccgagaagcggaaccattacatcaattgccgcctatttcagtacaaccgcagcactgtcgcttgtcggctcgactgttacgataaccgcacaactatacagttctactgtgccgaacaatacgttcaccccgatccccggagcatccgtcactttagctcctcccctcaccggcgtattgtcaatcggcagcatcagcaacggaatcacgacagggctgaacattgcggtaactcctcaaacccggctgttaatggtattctccgccactg

SEQ ID NO: 104 - DNA, 321 bp, Bacillus amyloliquefaciens
ggaagagatccttcatctccagcttgtagccatgctggttcagacggctcgccatttggatgcctttgatcgaatcgccgccgagcgtgaagaaattatcgcttacgccgatctggtcaagaccgagcacttcctgccaaatgtcagaaagcagcgtctccatctccgtttccggcgctttgtaagcggcgcttcccgcttcaatgtccggtgccggcagggcttttttgtcaatctttccgtttgcggtgaccggaagctcgtccatctccacccagaacgccggcaccatgtagtcaggcagcgtgtctttcagcgcgg

SEQ ID NO: 105 - DNA, 283 bp, Bacillus amyloliquefaciens
gaaagacctgtttgaaaacaaacttgtctttctggccactcaccgtcttcactggatgcttgagatggacgaaattatcgtgcttgatgacggcgcggtggcggaaatcggcacccacgacgaattgatggcgaaacaaggcgtatacgccaaacttgtaaaggcgcaactgggggaaagaacatgagaaaagaagaatggattctgccgtatatgaagcaaaatgcccgtttgtttgttcttgtgatttttttaggcgcggtgacgattttttcggcggcct

SEQ ID NO: 106 - DNA, 281 bp, Bacillus amyloliquefaciens
cgattttttcggcggcctttctcatgttcacttccggttttttgatctctaagtcggcgaccaggcctgagaatatcctgctggtgtacgttccgattgtggccgtgcggaccttcgggattgcccgttcggtctcacggtacgccgagcgtctgacggggcaccatatcattttgaaaatcgtgtccgacatgagggtgcggctttacaatatgctggagccggcctcgctcatgctttcatcccgttttcggacgggcgacatgctcggcattttggct

SEQ ID NO: 107 - DNA, 512 bp, Bacillus amyloliquefaciens
aactggctcgaccggggataccggagctactggagcaaccggcccaaccggcgcaacgggggtaactggagaagccggtccaaccggaatgactggagtaacaggaacaaccggctcgactggtgtaaccggttcaacgggagaaacaggcgcaaccggtgtaactggagaaactggcccaacaggagtaacagggttaacaggagaaatcggagcaacaggaataacaggcccaacaggaatcacgggtccaacaggagaaacaggagcaaccggagaaacgggtccaactggtgtaacgggatcaacaggggtaacaggttcaaccggagaaatcggcgcaaccggagaaacgggaccaaccggagtaactggggcgactggagaaactggcccaaccggaatcacgggtccaacaggagcaaccggagcgactggcgcaacaggggtaacaggttcaaccggagcaactggtccaactggtgtaacgggaataactggtgtaacaggac

SEQ ID NO: 108 - DNA, 734 bp, Bacillus amyloliquefaciens
ggagaaacgggtccaacaggagtaacaggggtgacgggagaaactggcccaaccggaatcacgggtccaacaggcccaaccggagaaactggctcgaccggggaaaccggagctactggagaaaccggcccagcaggagtaacgggaccaaccggctcgactggagcaacagggccgactggagaaaccggctcaactggtgcgacgggattaactggagaaaccggtgcaacaggagttactggcccgactggggtcacgggctcaacgggagcaacaggcccaacaggtgtaacaggatcaaccggtgcaactggagcaactggatcaaccggcgtaaccggagtaacgggggtaacaggcgcgactggctcaacagggccaacaggagttactggcgcaaccggagaaaccggctcaactggtgtaactggttcaatcggatcgactggcgcaacgggatcaactggagtaacaggagcaacaggtgcaacgggagaaaccggtgcaacaggcccaactggttcaaccggagaaaccggggcgacgggtgcatccggggcaaccggagcaacgggatcgacaggatcaaccggtccaaccggagaaaccggggcgactggacaaaccggcccaacaggggtaacgggtgtaactggagaaatcggcccaacgggagagaccggtccaactggatcaacaggctcaaccggaataacaggggcaacgggtcc

SEQ ID NO: 109 - DNA, 1427 bp, Bacillus amyloliquefaciens
aaaccggtgcaacaggagaaacaggagaaacaggagcgaccggagtaacaggggcaacaggagttactggcccgactggggtcacgggctcaactggtgtaactggcgcaaccggagaaactggctcgaccggggataccggagtgactggagcaacggggataacaggagcaacaggaataaccggaaccacgggctcaaccggcccaacaggagcaaccgggtcaacaggaacaaccggcgcaacgggcgccactggagcaactggagcaactggaacaactggaacaactggagaaacggggtcaaccgggtcaactggggagactggtccaactggtgtaaccggcccaacaggaggaactgggtcaaccggggcaacaggggtaactggagaaatcggtccaaccggagtaaccggtgcaacgggagaaaccggttcaaccggagcaacaggatcaacagggccaataggagtaaccggtccaactggaataactggagcgacaggagaaaccggttcaactggctcaaccggagtaacgggcttaacaggatcaacagggtcgaccggagtgactggtgcaacaggcacaaccggtccaacgggatcgacaggcacaaccggtttaaccggagaaaccggcccagcaggagcaacaggcccaaccggcgcaataggagagaccggtgtaacaggaataaccggcgcaacggggtcgacaggagaaaccggttcaacaggaacaacgggagaaactggctcaaccggtgcaacagggtcgactggagtgactggggcaacaggctcgacaggcccaaccggcgcaacagggctaacaggagaaaccggaaccacgggctcaaccggctcgactggtgtaaccggggcaatgggagtaacaggctcaactggtgtaactggtgcaacgggagtaactggggcgacaggagaaaccgggtcaactggggagactggtccaacaggagaaatcggttcaaccggcgcaacgggcgccactggcataaccggagcaactggggtagcaggttcaaccggagaaaccggtccaactggtgtaacgggagtaactggaccaacaggagcagcagggtcaactggttcaaccggagaaaccggggatacaggagcgacgggtgtaacaggtccaactggcccaacgggagtaactggagcgactggctcaacgggtccaacaggagaaaccggcccaacgggtgcaaccggctcgaccggctcaaccggagaaaccggaaccactggatcaaccggctcaacagggccaacaggctcaaccggtccaactggtataaccggagtaacaggggcaacaggagttactggcccgactggggtcacgggctcaactggtgtaactggttctaccggagaaaccggtgcaaca

SEQ ID NO: 110 - DNA, 213 bp, Bacillus amyloliquefaciens
agagattggtattgtgatggttgtcggcgttacggtcatcggggttgcatctgatccccctgcaaggttttttaattcttcttcagtcattggagtcagtgcttgaaaatcttttttcatggtaattcctcctattgtttgagtttttataaatttcagtcgttacatggactgacaatagacgcacatttagttgtcggacagcctgctaaa

SEQ ID NO: 111 - DNA, 1285 bp, Bacillus amyloliquefaciens
tccgcatatgcggaggctctgttatttcatcacattttgaatataagagccgaatgccgcgccggacatgcccggcgacacacggacgcggtgaagcccgtaaagcccctgatctcttgacgccgctcccggctccgtcgtgaccgccatacggtagcctgacgcggcggcggcttttaatgtttccttattatatcgtccgacagggtagctgatcatagacgtccgctgcccgaacatttgatcaaataaacgcttagagtccctcatttcacgtcgctgctgctgcggtgtgagcccgttcaattcgagatggttcatcgtatggctctgaatggaaatgccgtgggcggccatctccttcatctgcttctcagtcagatgattcttatgcccgataaagtttccgatcataaagattgtcgctttcatcttgtatttctttaaaatgggataggccgctttcacattgtcggtatagccgtcatcaaatgtgatcagaacacatttttcacgcggctccttatcctccgtcagcatcagataggcctcttcaggagtcatcgtataatagccgtgatcatgaagccacttcatatgctgccggaattcttccttcggcacacgcaggctgtttccctcagaaatgctgtggtacatcagaatcggcagtcttgccgttcctttcgttttaacccaggcggacgtatccggctcttttttgatttggcgctttacagattttttatcgtggtgcgcttctgccttcggaatgctttgttcggcgcttgcctcatggcccgagcaagcggcaagcgtaaacacggcagccaaaaggcacatgcacatgatcatgcgtttcatcgttttcctgctttctgtcttctatttactttttatatcggttatgcgtcataaattgttacatcaaaaaagccggacatccagctgtccggctttgcgttatgagcggattctgatttctgtttcactgtcaaaaaagtgagccttattcatgtcgaaagcgacggtcaattcctcaccggcacgaatgtcatggcgggcgtcaatccgggcgataaaatcctgatccccgatccgggaatagaccataatttctgacccgagcaattccgcgacattgattttagctgtgatggatgaattcttataggattctaccacaatcagctcgtcatgtatgtcttccgggcggatgccgaagataacatctttgccggcataccctttttcccgtagcattttcattttcccttccggcacg

SEQ ID NO: 112 - DNA, 1227 bp, Bacillus amyloliquefaciens
gttaccagtttggtctgttcgataaagcaggcgactggaagagtgttccggtaaaagacactgaagtggttgaacgactggagcacaccctgcgtgagtttcacgagaagctgcgtgaactgctgacgacgctgaatctgaagctggaaccggcggatgattttcgtgatgaaccggtgaagttaacggcgtgagtgaaatgtgccggatgtatcacatccggcaatatccattaaaactgataggtcatgccaaccgcgacaaggtgatgctgccaacttactgatttagtgtatgatggtgtttttgaggtgctccagtggcttctgtttctatcagctgtccctcctgttcagctactgacggggtggtgcgtaacggcaaaagcaccgccggacatcagcgctatctctgctctcactgccgtaaaacatggcaactgcagttcacttacaccgcttctcaacccggtacgcaccagaaaatcattgatatggccatgaatggcgttggatgccgggcaactgcccgcattatgggcgttggcctcaacacgattttacgtcacttaaaaaactcaggccgcagtcggtaacctcgcgcatacagccgggcagtgacgtcatcgtctgcgcggaaatggacgaacagtggggctatgtcggggctaaatcgcgccagcgctggctgttttacgcgtatgacagtctccggaagacggttgttgcgcacgtattcggtgaacgcactatggcgacgctggggcgtcttatgagcctgctgtcaccctttgacgtggtgatatggatgacggatggctggccgctgtatgaatcccgcctgaagggaaagctgcacgtaatcagcaagcgatatacgcagcgaattgagcggcataacctgaatctgaggcagcacctggcacggctgggacggaagtcgctgtcgttctcaaaatcggtggagctgcatgacaaagtcatcgggcattatctgaacataaaacactatcaataagttggagtcattacccgcgtatctattcccatattcgccaaagcaaaaccacacgaatggagtaacatgtgcggatgaatctccagtgacaacccggcattaccaccggaagtcgagataatatggtaaaactgttgccgagaaagcggattccccttacgtgataaaaatacccactcgctctcagcatgcgggtacgaagtacggata

SEQ ID NO: 113 - DNA, 241 bp, Bacillus amyloliquefaciens
gagctgagcccatgcagtgacttcacgtaatgacatccccccggggccgtaagccagccccagacgtagcagagttgcagcatcacgaatttcgcggcggcgggttagagccccggcattacgtgccgaagtatccagttcctcgggcttaccaatatgggccagaattgctgaccagttatcgtgagagtaattcatcggcacgttaaatcatatcaggcgtaataccacaacccttaag

SEQ ID NO: 114 - DNA, 735 bp, Bacillus amyloliquefaciens
gcgcctgttactccagtgtccccggtggcgccggtaatcccggtggcgccggttgcgccggttaccccggtggctcccgttattcctgtcgttcctgttactcccgttaccccggttgctcctgttattcctgtcgctccagtatccccggttgctcctgttactccggtggctcccgttatcccagttgctcccgttactcccgtggcgccgatttctcccgtcgctccggttactccagtggcgccggtgagcccggtggctcccgttatcccagttgctcccgttattccggtcgatccggttactccagtggcgccggtgagcccggtggctcccgttatcccagtggcgccggttgctccggttactccagtagctcccgttattccggtcgctccagtatccccggttactccagttactccggtcgatccggttactccagtatctccggttacaccggttgctccggttgctcctgttaccccagttgcccccgttactccggttgccccggttactccagtggctcccgttactccggttactcccgttgctcccgttaccccggttgctccagttactcctgttgcaccagtacttcccgttgcgccggttactccggttgttcccgttaccccagtttcacctgttactccggtcgctccggttactccagtttcaccggtgagcccggttgctcccgttatcccagttgcgcctgttactccg

SEQ ID NO: 115 - DNA, 334 bp, Bacillus amyloliquefaciens
tgctcccgttactccggtagatccagtatctccggtggctccggtcaagcctgttactccagtagctccggtggctccggtgagcccggtagatcccgttactcctgttgcaccagtacttcctgttgcgcctgttactccggttgttcccgttcccccagttgcaccggtggctcccgttattccggtcgctcctgttactcccgttaccccggttgctcctgttgatcccgttactccagtgactccggttgcgcctgttattcctgtcgctccggtatccccggtgactcccgttatccctgttgctcctgtaactccggttgcgcctgtt

SEQ ID NO: 116 - DNA, 266 bp, Bacillus amyloliquefaciens
caaggctgacagccgggcgaggttcccgccgcggcccgtcgcgtttccgatcaggacttcatcaatgtcttcgggcatgttccggctcaaatgtcggatcagcggagctgccaaatcttcggggagacagtcttttaacaggccgttttcccgggcgaaaatcgtccgcttcgcatccgtaattacagcttccattccatcatgtcctttgcctgcttttgtacggcggcacgggcgatctttccgccggctgtttccggtatttc

SEQ ID NO: 117 - DNA, 226 bp, Bacillus amyloliquefaciens
atccggcggacagcagcatgagcagacttcccgcaatcactccggctcatcccatacggacggccaggtagaccgcagccgcagtaaagaaacttcgccgaagcctcactataccgagccgattcacttcgaagaaagcgcggtaaatgttttaaatgacagcaccgtgatgaatatgctggaagaaattgaacccggaaatcattagaaacgaaaaaatccttca

SEQ ID NO: 118 - DNA, 1009 bp, Bacillus amyloliquefaciens
cccttaaatattaaaaattacctattatgatttaaattaagttgatataatctttatatttagcaaaaatataaccacctcttattgctgatattatgtagcaacaatgtgtaaattggtgtaatcccaataataggatctctaggtaaagaatatattcagtcatgtctggtctgacacagtaaccttaaagtatagcttatatatatttgtgtatcttgttcgttcgttcttcttgtgtattcatgctttttgctactcacttttaaaatacgcggatcagtgaataagacacggctgcacaccatatcatgcatagattaaataaaaacgacaccaaaaattttttagggtagttgtatgtgtaaaacgggtcatctcttcccgctacagtgattccaaaaggatggttgatatctagttaatttctttttcaagcagacctgcgaaacatgagaaagtcaccatcttttgaaatctatcttttttattttatcggattagaatgaatactcaaaaataattgctgttaaagtttttccgcaaccgaaaagacgccttccctatgaagacgccttttctttattcatattccttccatacacgcggcagcagttcagaaagttcgtgcgccaataaggtatgggcggagcgctctttcgtccataattccgcacattcgccgtgaaggcggacggcgttcaatacggcatgtttcgggtcttgatgacagcacagcatgccgagaatcattcccgtcagcgtgtcgccggtccccccttttgcaagcgcgccgtttccggttgtatttctgcggcattccccgtcgggaaaagcgataatggtttcgtttcctttcaggacaatcgtggcgtgaagccgctccgcccattccgcggcatatcccgctctgttctgctgaatctcttgaatcggaaggcctgtcattctggaaaattcgccgggatgaggcgtcaagatcacaggggctttcctctttggataggtt

SEQ ID NO: 119 - DNA, 273 bp, Bacillus amyloliquefaciens
cacttttccttcaagcacatctccctgctttaccttttcgccgacctggctccaaggtcccggcagcgtttctttaatagataaagaaatacgctcgttatcgcggtctacggacagtactttcacttttacgtcctgaccttcttccaccacgtcagacggtttttcgacgtgtgaatgagacagctgcgaaatatgaacaagcccgtcaattccgccgatgtcgacaaatgcgccgaaatcagtcagacgctgcacttttccttcaagcac

SEQ ID NO: 120 - DNA, 1081 bp, Bacillus amyloliquefaciens
gatcacaggggctttcctctttggataggttcttttcgtaatggcgcccgcgtccagtatgacgggataatcggcagaaagcagctgatcagccgcctgctgcacttcgtctgtttggggaaggcccggcccgatggcagcggcccggatggtttccccgggctggcccgccgcggcttttttccagccgtcacgccagtacgtcgcttccggcagcaccgggacgataagcgggatgacgcctgccgatgtaccgatgacgagcttgccgacaccgcttctcatcgcgcccaatccggccagaagggcggctcccggcatgtcatcgctcccggccagcaataacgccgtcccgaacgttcctttatggctgtctgcctcccgcttcggcagcgtatctttcacatcctgttccgtccaatccattatattcatctctgtacctcctcttctgtctcctatttatattccaaacaagaagagattttaaaccgcacaaaaaaacagccgctcgtttgcggctgtttatgttctgatcggaacatcaagacggtaaagcttccggtaccgttcgttttctgcaagcagctcttgatgggttccttccatttctgcttttccattttctaaaaagacgattttatcagctgtttccacaccagctaaatggtgtgtaatccagaggatcgttttctctttaaagacatcaaaaatcgtatcaagcaattcgcgttcagtgaccgcatcaaggccgaccgtcggttcatcaaggataatgaccggcgtgtcttggagaagaatacgggcaagcgcgatccgctgccgttccccgcctgagaaacgaatccccgtctcctgcacggacgtttcatatccgtcaggcagtgattcaatataatcatgcagcttcacttgccgcgccgcacgcttaacatcttcatcactcgccttgccgtttccgagccggatattgttcataatgctcgtgttaaagagatgaggtttctgattcaaaacggccaccgctgaggaaatctgctcccgcacggccgcagtttccagcccgttcagcatcactttg

SEQ ID NO: 121 - DNA, 478 bp, Bacillus amyloliquefaciens
cagcttattggcaacatataaagcagccggatgtggaggaaccacgcagtgcactgccatcaatgcggtacatagcggaatggcaagctttaataatgaggtattggtttttttggcaattgaaaaagccagaggaatcaatagcacgacgcccacttcaacaaacagcgtgatgccacaaatcaggccaaccagcaccataatgacatcaactgaaagccagcggcagcgttgaagtgtcagaccaattctttctgcggccccggatacttccatcatttttcccagtatcgtgccaaggccgataaccgctgcgaggaaccccagcgttccgccaattccactttcaatagcatttaccatatccagtggccccatgcccatcatcgttcccacgaagaagctggccagcaacagcgccagaaacgggtggaatttgaacttcacgatggtcagtacaattaacacgatgctgata

SEQ ID NO: 122 - DNA, 298 bp, Bacillus amyloliquefaciens
gggctatagttcggcgctttaccaccgcgcaggatcacatggccgtccggattcccctgagtttgtagcaacgcaacctgccctgcctggttaatgccaacaaaacggtgcggctgggcggcggcgcgcatagcgttaattgctgttgccagactgccgtcggtgccgtttttaaaaccaaccggcatggaaagcccggaggccatttcacggtgagtttgcgattccgttgtacgagcaccaattgctgaccagctaaacagatcgcccaggtattgcgggctattcggatctaacg

SEQ ID NO: 123 - DNA, 375 bp, Bacillus amyloliquefaciens
cagaccggtgttgtgctttatggatgcgttacgctcctgatgacgtcatttgacgctcaacaacatcacggggccgcacgacatttcacgtcagttagtgctatcgctcaggaacaaattttcccgaattgggatatgcccgcaaattgctggtgatgtggggagaatctggttgagttcgggagaattgatttggaggcagaacgcttaaatcgtggcgtcctgaaacgaaaaacggacctccgtggaggtccgtttatatgaatttggtgcccggactcggaatcgaaccaaggacacggggattttcaatcccctgctctaccgactgagctatccgggcaacggggcgcattaaaccgtaatctgcacatc

SEQ ID NO: 124 - DNA, 204 bp, Bacillus amyloliquefaciens
aacctatagtcaataatattttgagaaaaaaagtattttaatgattttttagtcatgtattttaagggccttttttagtatcggcagatcgttcgaattttttatatgtttattgaaaaaaagagtggttgaacatgttcgtgatttcccgtataatcttgaaagatatacaaaaactgaacataaaaaacagtggttttctag

SEQ ID NO: 125 - DNA, 794 bp, Bacillus amyloliquefaciens
cttcacaggatggtcggaacaacgaagagaaaaaaatcctgaaattcagggttgactctgaaagaggaaagcgtaatatacgccacctcgcgacagtgagctgaaagccgcgtcgcaactgctctttaacaatttatcagacaatctgtgtgggcactcgaagatacggattcttaacgtcgcaagacgaaaaatgaataccaagtctcaagagtgaacacgtaattcattacgaagtttaattctttgagcatcaaacttttaaattgaagagtttgatcatggctcagattgaacgctggcggcaggcctaacacatgcaagtcgaacggtaacaggaaacagcttgctgcttcgctgacgagtggcggacgggtgagtaatgtctgggaaactgcctgatggagggggataactactggaaacggtagctaataccgcataacgtcgcaagaccaaagagggggaccttagggcctcttgccatcggatgtgcccagatgggattagctagtaggtggggtaacggctcacctaggcgacgatccctagctggtctgagaggatgaccagccacactggaactgagacacggtccagactcctacgggaggcagcagtggggaatattgcacaatgggcgcaagcctgatgcagccatgccgcgtgtatgaagaaggccttcgggttgtaaagtactttcagcggggaggaagggagtaaagttaatacctttgctcattgacgttacccgcagaagaagcaccggctaactccgtgccagcagccgcggt

SEQ ID NO: 126 - DNA, 240 bp, Bacillus amyloliquefaciens
tatccgcaggccgaaaatattcatgaattctgggaaaacctgaaagaaggaaaaaactgtgtcaccgaaattccggagtctcgctgggactggcgccggtttgaaaatgtaaagtcgccttccggaaagagcatttcaaaatggggcggatttatcgatgatccggattgctttgatccccaatttttccggattacgccgcgggaagctgaaacaatggaccctcaggaacggctgttt

SEQ ID NO: 127 - DNA, 396 bp, Bacillus amyloliquefaciens
  misc_feature (187)..(187): n is a, c, g, or t
tatcaccagagcttgatcgacattactccccagcgcgtactggaagaactcaacgcgctattgttacaagaggaagtctgacggatgcgggttttgatcgttaaaacatcgtcgatgggcgatgttctccatacgttgcccgcactcactgatgcccagcaggcaatcccagggattaagtttgacngggtggtggaagaagggttcgcacagattccttcctggcacgctgccgttgagcgagttattcctgtggcaatacgtcgctggcgtaaagcctggttctcggcccccataaaagttgaacgcaaagcgtttcgtgaagcgctacaagcagagaactatgacgcagttatcgatgctcaggggctggtaaaaagcgcggcgctggtgacg

SEQ ID NO: 128 - DNA, 289 bp, Bacillus amyloliquefaciens
gatcaacacggtcgcattcaccgtcatgatcatctgatactctgctgtttgaccgttacggaataccgatgcggtatctttcgcgatgctcactttacccaaacgcagggatggaacgtccttacgcgtggtttctttatcaagcaactcgacaccattcagacgtaactggttacgcaccgcacggcttaatggcccgttcggatcgcctgagtccaggatcatgaccttcatagtggaaggaacctgcgtggtatcacgcagatgccagccacacccggcggtgatt

SEQ ID NO: 129 - DNA, 258 bp, Bacillus amyloliquefaciens
cttcctaaacaggcataactgtcgatttccgattcagctttacctgtctgccggtagtcagaattcataatacctgcaaaaacagaagtggttttacgctggagatcctgcaaagaaaccccggaatcttcgatgcaccgccaagtttcttctaaaaggattctttgctcaggatccatgtttttcgcttcccggggagagatattaaaaaacttatggtcgaaatggtcagctttatgaataaaacctccccacttg

SEQ ID NO: 130 - DNA, 692 bp, Bacillus amyloliquefaciens
gaacgcgccttcggtaataatcaccttatctcccggataaggggttgccggatcgacaatgtctttcggtttatataccgatagctgatgaatcaccgccgatgggactatcgctggcgacgcgccaaagcgcacgaagtgactgacaccgcgggtcgcgttgatagtcgtggtatgaatcacttctggatcaaattcgacaaacaggtagttgggaaacaatggctcactgactgcagtacgttttccacgcacgattttttccagggtgatcatcggtgccaggcaattcacagcctgtctttcgaggtgttcctgggcacgttgaagttgcccgcgcttgcagtacagtaaataccaggattgcataatgactcttatccgtttaatcggggcgcaaggatagcaaaagctttacgctaagttaattatattccccggtttgcgttataccgtcagagttcacgctaatttaacaaatttacagcatcgcaaagatgaacgccgtataatgggcgcagattaagaggctacaatggacgccatgaaatataacgatttacgcgacttcttgacgctgcttgaacagcagggtgagctaaaacgtatcacgctcccggtggatccgcatctggaaatcactgaaattgctgaccgcactttgcgtgccggtgggcctgcgctgttgttcg

SEQ ID NO: 131 - DNA, 438 bp, Bacillus amyloliquefaciens
ggcgtcacaccgtatacgtccactttcgtgtttgcacagtgctgtgtttttaataaacagttgcagccagctggtatctacgactgatttcagctccatccgcgagggacttcaccaacaaatcagcgtgccatctcccgaagttacggcaccatttagcctagatccttcacccgagttctctcaagcgcctgcgtattctctacctgaccacctgtgacggtttggggtacgatttgatgttacctgatgcttagaggcttttcctggaagcagggcatttgttgcttcagcaccgtagtgcctagtcatcacgcctcagccttgattttccggatttgcctggaaaaccagcctacccgcttaaaccgggacaaccgtcgcccggccaacatagccttctccgtccccccttcgcagtaactccaagtacaggaa

SEQ ID NO: 132 - DNA, 321 bp, Bacillus amyloliquefaciens
atagctcactggtcgagtcggcctgcgcggaagatgtaacggggctaaaccatgcaccgaagctgcggcagcgacgcttatgcgttgttgggtaggggagcgttctgtaagcctgtgaaggtgtgctgtgaggcatactggaggtatcagaagtgcgaatgctgacataagtaacgataaagcgggtgaaaagcccgctcgccggaagaccaagggttcctgtccaacgttaatcggggcagggtgagtcgacccctaaggcgaggccgaaaggcgtagtcgatgggaaacaggttaatattcctgtacttggtgttactg

SEQ ID NO: 133 - DNA, 306 bp, Bacillus amyloliquefaciens
ggtcggacatcaccggcccgataacgtagtaagtgagcacgccgaaaaccagcagagtaacgaacgggatcagcattgaaccgagcagcggttgtaatgctttgccaaggcgcactttgcggaaccagaagacgaaatagccaatcgccagccccagcaccaccgcgccgaggaatcccgcacccgactgggtgccgagcagcgctttgtcgttcgccagatagcaaaccagaaacgccggagcgaaagccggtttatcggcaatcgacgaggcaatataagcgcccatgatggggatcataaagg

SEQ ID NO: 134 - DNA, 287 bp, Bacillus amyloliquefaciens
cctaagctctctatagcgcttaatggcattgtactcacatcgaatgatgagacttcttttgtcttaattaatgaggggagcgaacaaaagcgatactccctcaacgaagcccttgagtcagcgccgggaacgtttattagaaaaataaataaaaccagcgttgtgtttgaaactcacgggcattacgaaaaagtaactctccatccagggctacctgacatcatcaagcagcctgattcagaaagtcaaaatgtactcgctgattatattatcgccacgcctatacg

SEQ ID NO: 135 - DNA, 497 bp, Bacillus amyloliquefaciens
ctccattaccgttgatttcaaccatccgctggccgggcagaccgttcattttgatattgaagtgctggaaatcgatccggcactggaggcgtaacatgcagatcctgttggccaacccgcgtggtttttgtgccggggtagaccgcgctatcagcattgttgaaaacgcgctggccatttacggcgcaccgatatatgtccgtcacgaagtggtacataaccgctatgtggtcgatagcttgcgtgagcgtggggctatctttattgagcagattagcgaagtaccggacggcgcgatcctgattttctccgcacacggtgtttctcaggcggtacgtaacgaagcaaaaagccgcgatttgacggtgtttgatgccacctgtccgctggtgaccaaagtgcatatggaagtcgcccgcgccagccgtcgtggcgaagagtcgattctcatcggccacgccgggcatccggaagtggaaggtacgatgggccagtac

SEQ ID NO: 136 - DNA, 476 bp, Bacillus amyloliquefaciens
gtctggctgcgggaaatcgacgctgctgcgcatggttgccgggctggagcgggtgacagaaggcgatatctggatcaacgaccagcgcgtgactgaaatggagccaaaagatcgcgggattgcgatggtgttccagaactacgcgctttatccgcatatgagtgtcgaagaaaacatggcgtgggggctgaaaattcgcggcatgggcaagcagcaaattgccgagcgcgttaaagaagcggcgcgcattctggagctggacggtctgctcaaacgtcgcccgcgcgagctttccggcggtcagcgccagcgtgtggcgatgggccgcgcgattgtgcgcgatccggcggtgttcctgtttgatgagccgctctctaacctcgatgccaagctgcgcgtgcagatgcgtcttgaactgcaacagttgcaccgtcgcctgaaaacgacttcactctacgttactcacgatcaggttg
